United States Patent Application Publication US 2021/0283234 A1 - sequence listing, part 6

SEQ ID NO: 3 - DNA, 4870265 bp, Artificial Sequence (residues 3,246,845-4,870,265 of 4,870,265)
  NCBI Ref Sequence NC_016855.1; Salmonella enterica subsp. enterica serovar Typhimurium str. 14028S, complete geneome
tcgaggcgcaagccaggccgccagtagcgctaacccaaaaaaccataagaacgacgcgctaatcgtgccgagggcgaaccagcgctttggctccatagccagttgtccgccgagactgcccaacacgacaaacgtatccagataaacgtgcggattcagccacgttaccgccagcatcgtagcaataattttccagcgcccctgcttcataacctcggcgctggccagctccagattactgctcattgccgttttcagcgcgccaaaaccgtaccataacaagaacgcgaccccgccccatgtgaccagcgccagcagccacggcgactgcatcagcaacgcgctaccgccaaaaataccggcgctaatcaggactaaatcacttaacgcgcaaagcagcgctatcatgaggtggtactggcgacgaattccctgattcatcacaaacgcattttgcgggccaagcggaaggatcatggcggcgccaagggcaaacccttgaaaataataagatatcacgttaactaccctgagctgtttttcttaaaggcagactatagcgcgggaatattattagcggaaattgataattttaatcactaataagaaaagctaataaagagactgaataacggatagcggctacgcttatccgctcaataaccagagaatactggaggcggataagcgcagcgccggcaggcagcgcgggagaaaattactccgcggcgttatctttcacgcgtttaaaattgacgtccatctgcgggtacgggaagctaataccagcggcgtcgaattcacgtttaatacgttccagcacgtcccagtagacattttgcaggtcgctgcttttactccagacacgcaccacaaaattaattgatgaggcgcccagctcattcaaacgcaccgtcatttcgcgatcttttaaaatacgatcgtcggactcgataatcgtcgttagcagctgtttcacctgatcgatatccgaatcgtaggccaccccaataatgaattcgttacggcgaaccggctcacgagaatagttgatgatatttcccgcgataattttgccattcggaatcacaataattttgccgtctaccgcgcgcattgtcgtggaaaagatttgcacgttcagtaccgtaccggcaacgccgcccaaatcgacatactcaccggcgcggaacggacggaacataaccagcaataccccagccgcaaggttagaaagcgatccctgtaatgccaggccaacggctaaaccagcggcgcccagtacggcaataaccgaggcggtttgaacccccacgcgacccagagccgcaatcagcgtaaaagcgataaccccatagcgcaccagcgcagaaagaaagtcggccactgtcgcatcaatatgacgcgcacgcatcagacgatttaccgtattggagatcacgcgcgctacaatcaagccgatgatgataatagcgatagccgcaacaatattcacagcatagctgagcaataacgcctggttgcgtaccagccaggtgcccgcaccatttatgctgtcgacaacattcaaatcttccattcaatattccttggtcatagcaaaacaagcaaatgagatcattctcacgaaaagaactttttaaaggtaaacaaaaacagaagaatatgccatttttcggcatcatcccaaaaaaggcaggtacattgtgagttggccggatgaaagcgctaactaacgccgctctccggaaataacgataaaaaaatggcttcccaagggaagccatttcaatcagcagactatattacagaacgtcaatcgcgttcagttctttaaatgctttttccagacgagcgatcatcgaagtctggccagcacgcagccatacgcgcgggtcatagtatttcttgttcggctgatcttcgcctttcgggttgcccagctgaccttgcagatacgcttcgttttctttgtagtagttcagaacaccttcccaggttgcccattgggtatcggtatcgatgttcattttcactacgccgtagcttacggagtctttgatttcctgagcagtagaaccggaaccgccgtggaaaacgaagttcaggctgttgtgcggcaggttgtgtttcttagaaacatagtcctgagaatcacgcagaatggtcggggtcagaaccacgttacccggcttgtaaacgccgtgtacgttaccgaaggaagcggcaatggtgaaacgcgggctgattttgctcagttcagtgtacgcgtaatcaacgtcttccggctgggtgtacagagcagaagcgtccatgtggctgttgtccacgccgtcttcttcaccaccggtgcaacccagttcgatttccagagtcatgccaattttggacatgcgcgccaggtatttggagcagatttcgatgttttcgtgcagagactcttcagacaggtcaatcatgtgagaagagaacagcggtttaccggtagccgcaaagtgtttttcacccgcgtccagcaggccatcgatccacggcagcagtttcttcgcgcagtggtcagtgtgcaggataaccggaacgccgtagtgttcagccatctggtgaacgtgatgcgcgccagagatagcgcccaggattgccgcgccctgaggtacgtcagttttcacgcctttacccgcgatgaaggaagcgccgccgttggagaactgaacgatgaccggtgctttaacttttgcagcggtttccagaacagcgttgatggaatcagtgcccacgcagttaactgccggcagagcaaaattgttttcttttgctacctggaacactttctgtacgtcatcaccagtgatcacgcctggttttacgaaatcaaaaattttagacatgtttcgttgtcctgtatcgtcgggctttgggaaaaaacacgggccgccctgaatgtcagatcggcgataaatcaacgggcaggaatccctgcccgtaacgattacttcttagcgcgctcttcgagcatcgctacggctggcagaactttaccttccacgaattcgaggaatgcgccgccgccagtagaaatgtaggaaattttgtcagcaatgccgaacaggtcgattgccgccagggtgtcgccgccgccagcgatggaaaacgcttcgctatcagcgatggcattcgccacgatttcagtccctttacggaagttcgggaactcaaacacgccaaccgggccgttccacagaatggttttggcattcttgaggatttcagccagctgctgagcggaagcatcgccgatatccaggatctgctcgtcttctttcacgtcgttaacggatttcagagtcgccggtgcggtttcggagaactcggtggcaacgcgaacatcggtcggaaccgggatatcgcaagtggtcagcagacgttttgcttcgtcaaccaggtcagcttcgtacagggatttaccgacgctgtggccctgagcggcaacgaaggtgttggcgataccgccgccgacaatcagctggtcagcgattttagacagggaatccagaacggtcagtttggtagatactttagaaccaccaacgatagccaccatcggacgagccggttctttcagcgctttacccagcgcatccagttcagcggccagcagcgggcctgcgcacgcaacatcagcaaatttgccgataccgtgggtagaagcctgcgcgcggtgcgcagtaccaaaggcgtccatcacgaatacgtcacacagggcggcgtattttttagacagcgcttcgtcgtctttcttttcgcctttgttaaagcgaacgttttccagaaccaccagctcaccttcggccacgtcaacgccgtccaggtaatctttgaccaggcgaaccgggttagacagtttgtctttcaggtagttaacaaccggcagcagagagaattcttcgttgtactcgccttcggtaggacgacccaggtgggaagttaccatcactttcgcgccctgtttcagagccagttcgatggtcggcagagaagcgcggatacgcgcgtcgctggtcactttcccttctttaacaggtacgttcagatccgcacggataaaaacgcgtttcccggccagatccagatcggtcatcttaattacagacatggtgaatcctctcaatgatgcttaaagttttgtcgacgctgacgcgtcgagcctgaaaccaactgcggccatcgctaacgtggtgtcgagcatcctgttagcaaagccccattcattatcgcaccagaccagcgtcttgatcaggtgggcgccactgacccgggtttgcgtgccatcaacaatggcgctgtgcgggtcgtggttaaaatctatcgagaccaacggtgattccgtatagtcaactataccatgaaatgcaccttgtgctgctttttgcagcaactggttgacttcactggcttttactggttttttcaccgttacgcttaaatcgatcgccgtcacattaatggttggaacgcgcaccgcaatcgcctcaaaacggtcgttaaactgcgggaatatacgcgtaatgcctgccgccagttttgtatctaccgggataatcgactggctggccgcgcgcgtgcgccgtagatcggagtgatacgcgtcgatcacctgctgatcgttcatcgcagagtggatcgtcgtgacggtaccagactcgatgccgtaagcatcatccaacaatttaatgacgggaattatgcaattcgtggtacaggacgcgtttgagacaatacgatgttccgcacgcagttggttctggttcacgccaaaaacgacggtggcgtcaagatcgttgctgcccggatgagaaaagagcactttcttcgcgccagcggcaatatgcgcctcgccatgctcccggttgccatatacgcccgtacaatccaacacaacatccacgcccagttcgcgccacggcagatccgccagcgttctttcatgcagaatacgaatgacatcgtcaccgacaaaaagctgctcgcgctcgtggcgaacctcccatgcaaaacgcccgtggctggtatcgtatttcaacaaatgcgccatgcctgcggcatccgccagctcgttgatggccaccacggtaatttccgcgcgacgtccggattcatacaaagcacgaaccacgttacgcccgatgcgaccaaagccattaatcgctatgcgtacggtcataggtctcctgcaaggctatcccgattcagatgaggctgacagagtaatgcagctcatcgtcgagtaaaaccttacctgtcgcaaactgcgactgattggttaattgtcgaacatttaattaactgaaacgcttcagctagaataagcgaaacggggaataaaaggaatgtttgtccagtcgaagaagacagttatctgacctgcatcacatttcatggccgcttacgctgcaatttattccatatttaagaatcaccagtacatccgtcagatcttttcatcgtcgcgtcacaaatactgatttatatcagaaagcgctgtcgccagcgtctatattatcagcgccacgtccgagtctcggagtcctgtaacgatgactgtatctcaccacaatgcctctacagcgcgcttttacgcgcttcgtctgcttcccggccaggaagtgttttcccaattacacgcctttgtgcaacagaaccaattacgtgccgcctggatagcagggtgtaccggcagtctgaccgatgttgcgctgcgttatgccgggcaagaggcgaccacatcgctcaccggcacgtttgaagttatctcgctaaacggcacgcttgaattgaccggcgagcatctgcatctcgcggtatcggatccctacggggttatgctcggcggccatatgatgccagggtgtaccgtgcgtaccacgctggaactggttatcggcgagctgccagcgctgacgttcagccgtcaaccgtgcgccatttccggttatgacgaactgcatatttcttcccgttaattgacgactctttaagaggtactttatggcgcgtcgcccgttttccagccagtccctggtgctgattgtcatcgctattgccatcaatatgattggcggacagcttattagcatgttgaagctgcctatttttctcgactcgatcggcaccttaattagcgcggtgctgttagggccgttcatcggcatgttgactgggcttctaaccaacttgctgtgggggctgcttaccgatcctatcgctgccgcgtttgccccggtagcgatggttatcggtctggtcgccgggtggctggcgcgcgcaggctggtttcgtaccctgcccaaagtgatcgtcagcggggtcgtcattacgttagcggtgacgctggtcgccgtaccgcttcgtaccgcgctttttggcggcgttaccggcagcggcgctgatttattcgtcgcctggatgcattcaatgggccaaaacctggtggagtcggtcgcgattaccgtcataggcgctaatctggtcgataaaattctgacggcgatcatcgtttgggtgctgctgcgtcagctaccgttacgtacgacacggcattttcctgcgatgtcagccgtacgctaaatgcatccgtttacctcgttaaccttatgggcgctggcggcctgcaccacgctgctactccctgcgcagaccgtgctcccggtttatagcgcggcggccttcctctgtctgctggcgctgaaatcaacgcggcggcgggcgaagtatgtcgcctggctgatgctgtctttagggtttgggctatggctggtacatggcggttggctaacggaatggataagcgggcagcctcgcgatccgcagcgctgggtatatgccgttacgctatggctacgtctgctggcgatcgtgtcgacgtcgcagctatggatgcagtatgtgccggttcagcggtttattcgcgccctgttcgcttcacgtctgccgcccggcatcgcttacctgttcgctggccctctgctggtcgtcgaacagctcaaacgacaactgacgatcgttcatgaagcccagcgcgcgcgtggcgtaccgctggatgaaggctggtatcagcggctacgggcaatgcctgcgctgatcgtgccgcttacgcaaaatgcgcttaacgatctgacaatacgcggcgcggcgttggatatgcggggggttcggctgcatcgagcccgaaccacgctgtgggcgccgaaagatagcgtgttacaacgggttgcgcggtatggcatggtactgctaatactggcggaagcgggagtatggatatggttacgttagagcagtttcgttatcttccgtccgatgcgacacgcccgccggcatgttttgatttccactattcaacacccggaatagtggcgatagtcggcgataacggcagcggaaaaagtacgctggcgcaactgatggctggctggtatccggattatctccccggtgatattgacggcacaggcttactgcttggcgtccctatcgggcggctcccgctggtagaacagtcgcccaccatccaattggtgcagcaatcgccttatttacagctttccggctgtacctttagcgtagaggaagaggtggcgtttggcccggagaatctcggcctccatgaagcggagattctacggcgcattgacgaggcgctgaccctgacaaactgccagtcgttacgccatcgccatcccggcacgctctccggcggcgaaacgcagcgggtagtaattgccagcgcgcttgccatgcagcccagactgttaattcttgatgaagccttcagtcggctgacgtcagcggccaccgggatgctgctggaacggttacaacagtgggcgctggaacgtcattctctcattgtgctttttgagcgtaatcattttccttttctgacgcgatgccagcgggtatggcaattgcgcgacggagcgctaaccccattatgttgacgttaaatcaggtcgcttatcgctggccggatgccgcagccgactgtttgcacgctatctcgcttaaacttcgtgacggcgaatggctggcgttgaccggcgataacggcgcgggaaaatcaacgctgttacggattatggccggcctgctttcccccgcttccggctcggtaacgcttaatggagagccgattgcgcagcttaaaaatcgtcaacgcgccgccgctatcggcgtactctttcaggaagcggaaaaccagattttccacagcaatgtcgcgcaagaggtcgcttttgggctgaaactacaacgcttatcggcggaggaaatttcacggcgcacgcaggccgcgctgcggttatgccagctaacggacgtcgccgaggcacacccgcttgatctgcacgccgcacagcgccggatggtggcggtcgccagtctggaggcgatagcgccgcctgtgttattgctggatgaacccagccgggattttgacgcccactggctaaccgtatttgaacactggctggcgacatgccgggcacggggaaccagcgtcgtcgcgattagccatgacgctgcgtttacccggcgtcatttttcacgggtggtacggctggaaaacggcaggttgtcaaagggagaataaaaaacgggtcgccgaagcgacccgttttatgccgtattaaggattacagcagtgctttcgctttggcgatcacgttgtccaccgtgaagccaaactcttcaaacaacagctctgccggagcagactcaccgaaggtggtcatcccgacaatagcgccgttcaggccgacgtatttgaaccagtagtcagcgatacccgcttcaatcgccacacgcgcagagaccgccttcggcagcacggattcacggtaagccgcatcctgcttgtcgaacgcgtcggtggacggcatggaaaccacgcgcgccttcacgccttcggcagtcagtttttcgtaagcggcaaccgccagctcaacctctgaaccggtcgcaatgaagataatctgcggctggcccgcacaatctttcagtacgtaaccaccgcgggcgatattcgccagttgctcttcagtacgttcctgctgcgccaggttctgacgggagaggatcagcgcggttgggccatcctgacgctctacgccatatttccacgccaccgcggattccacctggtcgcacggacgccatgtggacatgttcggcgttacgcgcaggcttgccacctgctcgaccggctggtgcgtcgggccatcttcgcccagaccgatggagtcgtgggtgtacaccatcacctgacgttgtttcatcaacgctgccatacgcactgcgttacgggcatattcgacgaacatcaggaaggtggaggtgtacggcaggaaaccgccgtgcagggcgataccgttggcgatagcggtcataccgaattcgcgcacaccgtaatgaatgtagttacctgcggcatcttcgttaatcgctttcgaaccggaccacagggtcaggttagaaggagccaggtcagcggagccgccgaggaattccggcaacagcggaccgaaggcttcgatggtattctgggacgctttacggctggcgattttggatggattcgcctgcagtttagcgatgaactcattcgctttcgcatcgaagtcagccggcatgtcgcctttcatacgacgagtgaattcagcagcttcctgcgggaaggctttctcataagccgcgaatttctcattccatgcagactctttcgcctggccggcttctttcgcatcccactgggcgtagatttcagacgggatttcgaacggcgcgtatttccagcccaactgttcgcgggtcagcgcgatttccgcgtcgcccagcggcgcgccgtgggaatcgtgggtaccctgtttgttcggcgaaccgaaaccgatgatggttttgcacatcagcagggacggtttgtcagtcacggcgcgagcttcttccgtggcgcgtttaatggcgtcggcatcgtgaccgtcaatgccacggataacgtgccagccgtaggcttcaaaacgtttcgcggtgtcatcggtgaaccagccttcaacatgaccatcgatagagataccgttgtcatcatagaacgcgatcagtttgcccagtttcagagtaccagccagagagcacacttcgtgagaaatgccttccatcatgcagccgtcgcccataaagacgtaggtgaagtggtcaacgatatcgtggccaggacgattaaactgcgccgccagagttttctcggcaatcgccatcccgacggcgttggcaataccctgacccagcgggccagtagtggtttcaacgccagcggtgtagcccacttccgggtgaccaggggtttttgaatgtagctgacggaaattctgcagctcggacatcggcaggtcataaccggtgaggtgcagcaggctgtaaatcagcattgagccgtggccattggacagcacgaagcggtcgcggtcggcccaggacgggttggtcgggttgtggttcaggaaatcacgccacaggacttcggcaatgtcagccatacccatcggggcacccgggtgaccggacttggctttctgtactgcgtccatgctcagcgcacgaatagcattggcaagctctttacgtgaggacattttgactccagatcggatgttgaaaggccatgcccgtaacgacttgacgacagcgcgttttgggctacgccggaaaatttgccaacaatttaccccaagccgcgcgtcatgtacatggaacatccttttaccgcttcagaaatctccggatcatgctcgtatgttgcgcaattagctaacttgcctgccatgcttttctttatacttaacccaggcgctaattcatctgcaacgggcgcatttcaaaataatattgattcgtatggaagagaaaaatgaaaattcgcgctttactgcttgctttgggcatggcgacggtgctgaccggttgccagaatatggactctaatggactgctttcttcgggcgctgaagcttttcaggcctatacgttaagcgatgcgcaggtaaaagcgttgagcgatcaatcctgtcaagagctcgacagtaaagcgaaaatcgcgccggcgagcagcgaatacactaaacgactggcaaaaattgccgccgcgctgggggataacattaacggccagccggtgaactataaggtttacgagacgaaagacgtcaacgcgtttgccatggcgaacggttgtatccgcgtctacagcggactgatggatatgatgaccgacaacgaagttgaagccgtgatcggccatgaaatgggccatgtcgcgctgggtcatgtaaagaaagggatgcaggtcgcgctgggcactaacgccgttcgtgttgcggcggcatcggcaggaggcgtagtcggcagcctgtcgcaatcacagcttggcgatcttggcgaaaaactggtgaactcgcagttctctcagcgtcaggagtccgaagcggatgattattcttacgatctgttgcgcaaacgcggtatcagtccggcaggactcgccaccagctttgagaaactggcaaaactggaagcgggtcgtcaaagctcgatgttcgacgatcacccggcgtccgccgcacgcgcacagcatgtgcgcgatcgtatgagcgcggacgggatcaaataatccccgaacagtgccggatggcggcgtgaacgccttatccggcctacaagcatcaatcagctgtaggccggataagcgcagcgccatccggcaaaacaacttactcgcccttcttcgccgcctggatatagagcatttctaatgccagcgtcgcggccgccagagcggtgatctccgactgatcgtaagccggcgcgacttccactacatccataccgacaatgttcagatctttcagaccgcgtaccagtttaatggcgcgatcggaggtcaaaccgccgatcaccggcgtaccggtgccaggcgcaaacgccgggtccagacagtcgatatcaaaggtcagatagaccggcatatcgccgacgatctgtttcacctgagcgagaatatcatccacgccgcgatcgttgacctggcaggcatccagcacggtaaagccattgtctttgtcaaactcagtacgaataccgatctgtaccgaatgatgcggatcgatcaggccttctttcggcgcggtgtagaacatcgtgccgtgatcgaattcgcagccgttagcgtaggtatcggtatgcgcatcaaaatgtaccagcgccattttgccaaaatgtttcgcgtgggcgcgcagcagcggcagcgtgacgaagtggtcgccgccgaaagagagcatacgcttgcctgcagacagcagtttttcagcgtgcgcctgtaatttttcgctcatttcacgggcatcgccaaacgcatacaccaaatcgccgcagtccacgacgttcaggcgctcgcgcatgtcaaaattccacgggaaacggtgatgttcccaggcaaggttggtcgacacctgacggatcgccgccgggccatgacggccgccagcgcgaccggacgttgccatatcaaacggtacgccagtgatcacccagtcggcatcgctgtcatacggctggaagttcattggcagacgtaaaaaaccaaacgcattagaaaccagtgagttatcgtactgatgacctaaggtgctcatggcaaaaacctcttcttagtcaatataaaaaaaccctcccgcgtcgttaggcccgacgaggaagggtttgaatttgtttacggctcaaagtttactctgacagaccgcattattgaagtcagtttagccaggtacagtagacaacgcccgaaaaaaatatatatccagcgcaaatcagtaggctcatacgtccatcgcggtcagttaagaggccttagggatttgccgctgtaaaaactcaagcactaatgcgtaaaacagcggtgtttttcctggcgtctggaaaatggcgtgaccgctaccgggaatgagggtcatctccgcctgaggcagcagccggtacagctcggtaacttcttcaacggtgaaaaattcatcccggtcgccgtccagtaatagcacaggaatgtggatttttttcacctcttcttccgccagcgatgtgggcgttgtccacattggccagacacctttgaggaacgtgcgccagtagtctttttgctctggatgatgcatgttctgataaaatttaaccatcccgggcgcatccgaagccattttatccagatcgcgatccgtcaattgcccctgaggcattcctttaccataaaaaatttccatcccctgcatgtaatgggtcgtagcaaagcgatgcgttgcgccgccgacgatagcagcgcgcgctagatccgggtatcggctggttaacttcagaacgaccatgccgccatcgctgtaacccatcaccagcggtttttccagcttcagcgctttaacaaaagccgccatatcttccgtcatcagatcatagctaaacgttccttgcgggttattggttaatccatgtccacgactgtccggcatgatgacgcgaaaatatcgagatgcctctttcgctaatccctgccaacttttcgccgtcagaccaccaccgtgaatcaacagcagcggaggcccctcgccctcttcaacgtaatgaattttgataccattcgcttccacaaatttatctttgtccatcgttgttgctgaagcatttattaaaaatataatattgataataaaaataaatgctaatttaaaaatatgattcataacacctcgccaatcactttccgtgtaaaagaccatattattcagattgaacaaaaataacatcaaaatcgatttgtatcattttcacttatttaccggggagaccccgcatcctctttttacagaacgtaaaaagcctttccgcgattaaccccaacgcgaaaaggctctgaagtcagaaaagtgccaccttattcattctggctgtaattcaggatgacttgaaggtctcttcctgaattgcatttagcgctttctttattccttcgcctgacaagactagcttgactcgctaaatgccgtggccggaattttcacaatcgcttttttaaccggcgcaggtttaccacgcgtacaaagcggacggtggacctggttgggataaaaaagcgcgaaatcgccaggatttaatgtaacgaactgctcattagcgacacattcaggaaagatgatgtcatcaggaagatgctcaagctcctttatcctggtatcaattttgttggaatagccaatctcctcataaccgcttagtaaaatctgaacatcgatatattttttatgaagttcagctttgcggtttaacgaagagtgtgtttctccttcgcttatcataagaaatgactccgggaaagaaagttcatatctaccagcaggctgatcttcagctatcttcaccgcttcgatgataagttttttaataatgtggttaacgtaaggtaataaagtaagctgctctatatttccatatagcatactatagttatcctaaataatggtcgtgattataattatcagccaatcaggtactggtaaataccttcagccacaggaataccttcttttaaacatttttctttataggcgatttgcggatcgtttggcgccagcactttatcaacaccgggcatcggttttacagcccttagctcattgaccattgtgctcattattgaggaaaacagcggattgcccaacatctgcggatcaataacgataaccagactcgctaacttgcgcatcttgtcatagtcgccatacatccgaacaatatggttgctaaagtttgcccccatcaggacgcccgtgagcgcatcaatcgccagggcaataccagaacctttgtgtccgccaaagggcagcagattttcaattttatgcggatcggtagtgatatgtccctctttatccagcgccagaccatgacctattggtttcccggtttctttggcgtgcagaattttaccaaacgcaatggcgctggtcgccatatcgacgatcatcggatggctgtctttaacggggaagccgaaggcgattgggttagtccccagaaagcgctccgcgccgccatacggcgcaacacaggtatccgtttgcgtcatggcgatagccaccattccctggcttgtcgcctgctcaatgaaccacgagagcgcgccgcagtgggacgtatttttgacgctgacgaaacccagccccgtctctctcgccagactaatagcgtgatctgtcgcctttatcagcgcgcagtgtcccattccatcatcagagtccagaatagcgactgaaggcgaaatctgttcgatgctgaatgttgcttttggattgagcccgcctgcgttcaggcgggtacaatagtgctctacgcgaataacgccgtgggagtgaacgccggtaatatcggcatgaaccaaaacgtcggctacctgctgcgccgtttgcgcgtcaagacccgcctgggtgagtttattaaacgccagcgctttcaattcattttctttgactaatattgttgacataactatcccgctattaaaatttgataacgcctttaaccaattttttgttttctaccacgttcttctggtactggttgccgaacgtatagaaatcgaattcctggtttttcatcattgtttcgctaatagcgccctgagccattagctcaatgacacattcgaagtcttcccgcgtcgcgttacggctgctcaatagcgtggtctcttttttatggaaggtcggatcgtcaatgacgagctcgccgatatacagcccgatgaagacgatttttccgccgtgacgaatcagatcgacagcgcggctcatggaggatttattgccggtggcatcaagcacagtgccggctaattcaccggagaaacaggctttcagcgcatcaatatagtcgtctgacgacggatcgagcgttgcaacgcctaccttttcggcgaccagacgacggcgttcggcgtcaatatcagctaccgcgacgcgagcgcctttggcttttgctatcgcggcggcggccagcccaatcggcccggcgccgaccaccacaatgttttgctgcggcttcacgtcagcgcggcgtactgcatgggcgctgatggcgaaacactcaaccagcgcgcccgcgctgtcagtgaggttatccgacagttcaaccagattttgttcacgaacggccagatattcgctaaagccgccgtcctggtgaacaccatacagcgagacgttctcacagcagttggtttttccttcccggcaggctgcgcaagcgccgcaaggaatacagggaataacgctatagcgttggccgaccttcgccgtgctgcacgatttacctaacatttcagccacgccgcaaatttcatgacccagcacgcgcggataggcaaaaaagggctggcgaccggcaaacgcatggatatcggtgccgcaaataccaaccgctttaatttttaacagtacttcatcgtcttttaaatgaggaatatccctttcaatgtattcgatatttcccggattattacagataagcgttttcatacttaaccctttgaagataaacggtgaatggtggccgtgacgccatgtaattcaatatggttaaaggcctgctgaatgttgtttaaaaagtctgcgttgtcgctggccagcgttccaaagatgctatttatctgcagcaaagacagcgcttgttcccatcgcgtgtttttatttttaatagccgcattgaaggtatcattgagcgggtcggccacgctctgcccctgagagagcgtattaatgacgtaatggagccagcccgcaatcagcgtcgctaacgccctgcccttaacaccgcgcgcctggagcgtcagataaggatcgacggcccgctgaggcagcttctgagaaccgtccatcgcaatctgtccggtcttatgtttaatattcgggttgctgaatcgatcaatgagcaactgcgcatattgatgtacatctaccgccaaattcgggcgcagcgattttgcctgctcttccgtcattaaatgatgtacggcggttttaaaagcgtcgtcttccatgcactgatagataaactcatatccggccaggctgccgttataggcgagaaacgaatggctgccattcagcatacgaagtttcatttcttcatagggaagcacgtccgagacgaacatcgcccctgctttatcccagtcaggacgaccggcaacgaaattatcttcgataacccactgacggaaatcctcgcatacgatgccgcagggatcggcaaaaccgatctggtctttaatcatgtcaaattgctctggcgtcattgccggcacgatgcgatcgaccatggtgccaggaaaggtgacatgcttcgctatccaggccgccagttgcggatcgagattatcggcaaacgtaacgatcgccgttttggtcaaatgaccgttttccggaatgttatcgcacgacagtacactaaacgggggaagcccttgctggcggcgtatccgtagcgcttcgacgatcagtccgagtgctgaccggggatgttcaggatcggcaagatcgtgtttgatgagcggatggctgagatcgagcgttctggaccgtggatcggtgcagtaacctttttccgttatcgtcaacgaaacaatttttacctgcggctcagtcagcttctcgatcgccgcctgaatacctgacttcggcgtatgcaacgcgccggtgatggtacgaaccaggcgactattgatggcgctggctgacgtttccaccactgaaaacagcccctgttgcgcatttagcgcatccaccagctccgcatcgccgaacagattcagttcaaaaatcccccagcggttgccggttatctcattcgtgagatcgttataaacagcctgatgaccacggtgaaaggcgccaaatccaatatgtacgatgttggcttccattccctgacgtgaataagtcgttttgaattggtgccttgcggcgtctaactggcgagctatggtgtccatgaatttttcccactcctgttttgtttaccaattctgcttaaacaccataccaaaatccgtgaatatgatcacactcatggcaccagattctttaccatggtatgctgactaatagccaatgaataaaaataatttatttatcaattagttataaaaagcacttctcaggataaattttacgattcacaaaagcgtgattttgattagaaaaatcggccacaaattggcataccacccatacaacccgtaatcattaaaccacatgaaaaacaatatcttattgaataacacgcccgctgcaagtgtatatgtcacgcatgattggttcaataatcacccgaaatacagcaaaccaaacctgataatttgtctagtgaattaatgaactcaatttattatcagcatcaacattaacctaagaacatcagttacggttttgatcatccgggtcgctgctaaagcgatgaggagtgagccgcctttagacgtaattggcaaattaatccattgatttaaaacaggaaaaaattgatgaagacgcggattaggcacgttgaaacaaagctttcaaagcccctctggccgaggtcttagttgacgtgaaacatggcataatagccatttcgaactggtaaccacgacgattacgctggaagacggttcaactggcaccggatatacctataccggcggaaagggagggtatgcaattaaagcgatgatcgaccacgatcttgccccggtactgtcagggaaagaggcgctgcgattgacgatatctatgactttatggaatagcatattcactatgtgggttgcggaggcatcgcgtcgtttgcgatgtctgcgatgtctgcggtggatatcgccctttgggatttgaaaggcaaacgtgaaaaactgccgctgtggaaaatggctggttgaaggcggcgcgtctgtcgacgaatagcggtcgtttggtatgctcgctcggtatgcaggaattacacgtcagactggtttccgcattcgagactggctgactggaggttcacagtttcccaatcgatcaatataccaaacatccgctggtggtcgacaattatcgcgccgtggcaccggacacctacggcattggcgtagagtttgactgggataagctgagcgtttacgaagcctgattccctctctccgggcttgtttttggcggcaggcccggttaatcgctgacaaaaatgtcatccgcctgaaaatagccgtcaggtggcgaagaaaaaatcatcaaaatcttccagcgaatcatcctgttggaagatttttaccagctcatttttactgttttcaagatgggtccacgaagcctgtctggcctgctcagcatcgcgtttttgcaatgcaaggaagatactacggtgatcttccacccatttcattcttaactctttcttatgtaaatacttatagtttaactgcttccagcgcggattttcggtcctgacagcccgccacagctcggcagattgtttcattaatacacgattttgcgtggattccgcgatgatattgtggaactggcgatccagttcttcaaatttgtcgctgtcgccgccaatctgcttttcctgctgctcaataatacgtttaagctgcttaagttcattaaatctgatttgcgtagcggcaaaaccggtgatgttactttcgatgacctgccgggcctgtagcaattcaaaggggccaatgtctgagtaaggcaagagcgctttttgattgattttttccagactatcaataaagtaagtgcctgcgccttgcttaacctctaccactcccttcagctcaagcataataatcgcctcacgaatcgtcgtgcggctggtttgaaaacgctcgctgagttctctctccgccggaagtcgctcgccagctttaaatacccctgaatagagtagttcttctatttgcagccctatatcaaaatagcgccgcttggttaaaatttgttccatgcacatacctatgtagacagcaattgctccacttgagggtagtgtaaacaaatcctaatgtttatggtaaacaatttccctgccagagagtggtcgtttctttcccgcaacctacggctatgcgcgtcacacagtccttccccaccagactcggcaggaaaggtgctgattcccataacgcatatttgacgtttgatgccgggtttatttgcggcagggcggcggcgcatacccgttgttgtccgccgggaaagcctgcgaggaacaaggcggtagcgtatttgttgctttaccctgcaatgcaaaagcggcaaagccgatgacgccgatgttgcgtacatcgccctgcgcggagtgggccgcataagcgtcagctacgtcggcgaactggaatgccgcctcagtgtgtttatctttgcgaaaccctttaatcgccagtgaatcgccggcgttaacaatatagccatgatgattcagcgagcctgcttttccgttcaacacgtccaggccatcaaccgttgcgacgatttcgtaattggtatcatgactgtaattacgaatatataactgatagttcatccctgatcttgcaggaatactatattgccattgtcccattgatgcgttgtagcgacgagtaattggaatcgaattaaaattagcgtcgcgcacagcatattcaagatcgctgatacgtatactataaactttatcgtaacctgacggatattgagtggagtaatttattatcaccatttcggcaggttctcgatcggcacgttctaccgaaacgctttgtaccgatgaatgcacgtcgccgccccaagcggtgccgacgtcggatgaagagccattattagattgcattccgctggaacaaccgcctaacagcaaaaacaagccaacaatgacggcattaaatttaaatttgctcatactcacccccctttttaattattagggggattgtaggcccataagattacatagagaagcgacgcgctgataattaagaatttataaaatataaaagggtcgatttaaataattaaatcgacccacaagtggaatactcttaattactcatcttcaagataagtataaccgtacagtcccgcttcaaattcctcaaggaactgctgctgcaacgcatcgtccagatccgtctgttttacctggtcgcggaaatgcattaacagcgttttcggatccagttgcacatattgcagcatatccgcaacggtatcgccttcgtccgacagttcaacctcgacgctaccatccgggaagacaaacacgtcaaccgcttcagtatcgccaaacaggttgtgcatgttaccgaggatctcctgataggcgccgaccataaagaagccgagcatcggtggattctctggatcgtattccggcatcggcatcgtcgtggcgataccgtcgccatcgatatagtggtcgatagcgccatcggaatcacaggtaatatccagcagcacggcacgacgttccggtacctgatctaacccttccagcggcagcaccgggaagagctgatcgattccccacgcgtccggcattgactggaacagcgagaagttgacgtacattttgtccgccattcgctcttgcagttcgtcgataatcggacgatgcgcacggttttgcgggtccagttgcttctgcacttcatggcacatgctgagataaagttgctccgcccaggcgcgctcctgcaaactaaacgcgccggaagagtagccgatatgaatatcgtgcagatccatttggctatcatgcagccattcacgcagcgagcggcgagtgccaggcttatgcatctcctgccaggtttcccacagattttgcagcgcacgcggcgcatcttcagcaggggcagtcggatccgtgtattcgttacgctccacgccgataatgttagagaccagtaccgtatggtgcgcagtgacggcgcggccagactcggtaatcaccgtcggatgcggtaaaccatgctcttcgcaggcatcgccaatcgcccagatgatgttattggcatattcgttcaggccatagttcaccgaacagtcggactgcgagcgggtaccttcataatccacgcccagaccgccgcccacgtcgaagcactggatattcacgcccagcttatgcagctcaacatagaaacgcgcggactcgcgcacgccggtcgcgatatcgcgaatgttcgccatctgcgatcccaggtggaagtgcaacagttgcagactgtccagacgcccggcgtcacgcagggtctccaccagttgcagcacctgcgtcgccgccaggccgaattttgatttttcgccgccggaggattgccacttaccggacccctgagaggccagacgcgcacgtacgcccagacgaggaaccacgttcaggcgctcggcttcttccagcacaatcgcgatttcagacatcttttcgatgaccagataaaccttatggcccatcttctcgccaatcaacgccagccgaatgtattcacggtctttataaccattacagacgattacgctacgggtcatgccggcatgcgccagcaccgccatcaattccgcttttgaccccgcttccagccccaacggttcaccggaatggataagggactcgatcacgcggcgatgctgattgaccttaatcggataaacgaggaagtagtcgccgttataaccgtaagattcacgcgcacgcttaaacgccgcgttaattgaacgcaaacggtgttgcaggatctgcgggaagcaaaacagcgccggcagacgctgaccttgcgcttcgcgcgctttcaccagtttggcaagatcgacacgcgcttccggtacgtcgggatcggggcatacgctaatatggcccagctcgttgacgtcgtagtagttattgccccaccaggcaatattgtaagtgcgcagcatcttgctggcttcctgggagctcattgcaacctcctgcatggagcgtagtacaccctgttcgcctgctgacgaaggcgaacccatagacatgtcgtcagacatagcgaacctcaatttttattagcaagtgtaaaacagttgactactatcgcaatccgaagacgcgataacaacccatagacaagcggattttccagcagatagcgctgatgctccgcctgcgcgaccggtttctttttcatatcattgtaaacacgtaaccgaactcacagataacggttcggcgaaaccacgagaaaactcttgcgttaacaagagcgcccttgttcagtcttcagcgccattgccggctctggaatcctgagaagcgccgagatgggtataacatcggcaggtatgcaaagcagagatgcagattgcgggggacatgcgcgcaccagaacgatgcgacagattcagcagaatacaacggttcattatctcgtatcacctccacggccgcctcgtaagacgaacccacaagccaaagcaacgttttaacccggctggaagtggcgacacgaagaaaacgtcgtgtgcttttgtatgagccgcgcgtcgcgttttatacccagaacgcagaaaaaaagcaaagcataaatgcgcataatgtcagcattatcagaaacgtttaccgcctgattttgaccgacattgcgacggccttcaaaaaaagctggaaattgggcgaagaagtgacctaaaatagccgtccagatgttaatccatccatactgattaacactcagactgccagtgtcagcaaccttcagactcatggtagaatcttctgtcatgactattccgcacaacagtttgagctaactaaattctccttaggtgaaattaaatatggcaaaacacctttttacgtctgagtccgtatcagaagggcatcctgacaaaatcgcagaccaaatctctgatgccgtgttggacgctatcctgcaacaggatccgaaagcacgcgtcgcctgtgaaacctacgttaaaaccggcatggttttagttggcggtgagatcaccaccagcgcctgggtcgatatcgaagagattacccgtaatacggtgcgcgaaattggctatgtgcattccgacatgggctttgacgccaactcttgcgcggtactgagcgcaattggcaaacagtctccggatatcaaccagggcgttgaccgcgcagacccgctggaacaaggcgcgggcgaccagggcctgatgtttggctacgcgacaaatgaaaccgacgtactgatgcctgcgccaatcacctacgcgcaccgtctggtacagcgtcaggctgaagtgcgtaaaaatggcaccctgccatggttgcgtccggatgcaaaaagccaggtcactttccagtatgacgacggcaaaatcgtcggtatcgacgccgtggttctctctacgcagcacgcagaagatatcgaccaaaaatcgctgcaagaagcggtgatggaagagatcatcaaacccattctgccgtctgaatggttaaatacgtccactaagttttttatcaacccaaccgggcgttttgttatcggcggcccgatgggcgattgcggtctgaccggtcgtaagatcatcgttgatacctacggcggtatggcgcgtcacggcggcggcgccttctccggtaaagatccgtctaaagttgaccgttctgcagcttacgctgcgcgttatgtcgcgaaaaacatcgtggcggcaggtctggcggatcgctgtgaaatccaggtctcctacgctatcggcgtagcggagccgacgtccatcatggtggaaacgttcggtactgaaaaagtgcctgctgaacagttgattctgctggtgcgcgaattcttcgacctgcgcccgtacggcttgattcagatgctggatctgctgcacccgatctacaaagaaactgcggcttacggccacttcggtcgcgaaaacttcccatgggaaaaaaccgacaaagcgcaactgctgcgcgatgctgccggtctgaaataatcgcccgcgcctgacgctgtttttcagtcagggaaaccataccgtacttatcaaggccagcgctctgctggcctttatcattgctgatacacgcaacgttatcagatattccagcgtgaatttatactgacctttttgtgatgcgcagcacaatccactctcccctttcgtttcttcgactacactttttatcattcagtttcagtcatcatgaaagcggttacattcattttcattaagaactgactacatcactatcggtatgctaattctgcgatgaaaatattacataatttttcaactttgtctaaataccaggcgattgatatggttataagattattaaaactattatttttcagataattaaataatcaccgagataaatagcagtgtaaacgattacaccattgtgattagcctcacatctttttacggcgtactcacctactcttaacatcgataaaattgctaacccaaccggagggcataatgcctgacaataaaaaacaagggcgttccaacaaggccatgacattttttgtctgctttcttgcagccctggcaggattactttttggcctggatatcggcgttatcgccggtgctttacccttcattaccgacgagtttcagattaccgcacacactcaggaatgggtggtcagctccatgatgtttggcgcggccgtcggcgctgtcggcagcggctggctctcctttaagctgggtcgtaaaaaaagcctgatgatcggcgctatcctgttcgtcgccggttcgctgttctccgctgcggcgcctaacgttgaagtcctgattatttctcgcgtgctgctgggtctggccgtcggcgtcgcttcctacactgcaccgttgtacctgtccgagatcgcgccggaaaaaattcgcggcagtatgatctcaatgtaccaactcatgatcaccatcgggattctgggcgcttatctgtccgataccgcgttcagctacagcggcgcatggcgctggatgctcggcgtgatcatcatcccggctattctgctgctgatcggcgtcttcttcctgccggacagcccgcgctggtttgcggcgaaacgccgtttccatgatgctgaacgcgtcctgttgcgcctgcgtgacaccagtgcggaagcaaaacgtgagctcgatgaaattcgcgaaagtttgcaggttaaacagagcggttgggcgctgttcaaagagaacagcaacttccgccgcgccgtgtttcttggcattttgttgcaggtcatgcagcaatttaccgggatgaacgtcatcatgtattacgcgccgaaaatcttcgaactggcggggtacacgaataccacggagcagatgtggggcaccgttattgttggtctgactaacgtgctggcaaccttcatcgctatcggcctggttgaccgctggggccgcaagccgaccctgacgctgggcttcctggtcatggcgattggtatggggattctgggtacgatgatgcacatcggcatccattcgccgtctgcgcaatacttcgctatcgctatgctgctgatgttcatcattggatttgcgatgagcgctggtccgctgatttgggtactgtgctccgaaatccagccgctgaaaggccgcgatttcggcatcacctgctccaccgcgaccaactggatcgccaatatgatcgtcggcgcaacgttcctgaccatgctgaacaatctgggtaacgccaacaccttctgggtctatgcgggcctgaacgtactgtttatcctgctgaccctgtggctggtgccggaaaccaaacacgtttcgctggaacacattgaacgtaacctgatgaaaggtcgtaaactgcgcgaaatcggcgcccacgactaatccctccacgcttcctcctgccacaggaggaagcgtttttcttgcagtccctcttccgtcgcactattctctgccgctatgaaaacccctcgtctccctatcgctatccagcaggccgtgatgcgtcgtctgcgggaaaatctcgcccaggcgaacctcaagctcgatagacattatccggagccgaaactggtgtatacgcaacgcggcacctcggcgggcaccgcctggctggagagctacgaaatccgcctcaacccggtgttactgctggaaaacatcgacacctttatagcagaggtcgtgccgcatgaactggcgcatctgttggtgtggaagcacttcggacgcaaggctccgcatggcaaggaatggaagtggatgatggaaagcgtgctgggcgttccggccagacgtactcatcaatttgcgctgcaatccgtacggcgcaacacctttccctaccattgccaatgccagcaacatcaactcaccgtccgccgtcataaccgcgtagtacgcggcgaagcggtttatcgttgcgttcactgcggtgaaccactggtcgccgggtagttcccgaaacgtccgggaactttcctgagcggactgattgcatacagacacaactttcgttacgttgcgggctcgttttgctatggagtgtgcaatgtaccgtaatttttcttttgccgctgcgttgctggccgcagcgttttcaggccaggccctggccgatggcattaacaatttttctcaggccaaagcggcgagcgtcaaagtcaatgctgacgcgcccggcagcttttactgcgggtgccaaatccgctggcagggtaaaaaaggcgtcgtagacctggagtcctgtggctataaggtgcgtaaaaacgagaatcgcgccagacgcattgagtgggagcacgttgtccccgcctggcaattcggtcatcagcgccagtgctggcaggacggcgggcgaaaaaactgcgctaaagacccggtctaccgcaaaatggaaagcgatatgcataacctgcaacccgcgattggcgaagtgaatggcgatcgcggcaactttatgtatagccagtggaacggcggcgaaggtcagtacgggcaatgcgccatgaaagtggattttaaagcgaaaatcgccgagccgcccgcccgcgcccgtggcgcaatcgcccgcatttatttttatatgcgcgaccaataccaactgaaactttcccgccaacaaacgcagctttttaacgtctgggataagcagtaccccgttaccgcctgggagtgcgagcgcgatgcgcgtatcgcgaaggtccagggtaatcataatccctatgtgcaacgcgcttgccaggcgcgaaagagctaacctacactagcgggattcttgttaacccatgccctggatagccaaacgccggggccatgacgcggatttttttattatgcgtattccccgcatttatcaccctgaattgttgacgtccggtacgcagatttcgttatgcgaagatgcggccaaccatattggtcgtgtacttcgcatgggaccgggacaagcgctacagctgtttgacggcagcaatcaggtattcgatgctgaaatcattagcgccagtaagaaaagcgttgaagtgcaagtgatgaaaggcgaaatcgacgatcgtgaatcgccgctgcatatccatctgggccaggtgatgtcgcgcggtgaaaaaatggaatttactatccagaaatcgatcgaactgggtgtaagcctcattacgccactgttctctgagcgctgcggcgttaaactggatagtgaacgtctgaacaaaaagcgccagcagtggcagaagatcgccatcgccgcctgcgaacaatgcgggcgtaaccgggtgccggaaattcgcccgccgatggcgctggaagcctggtgcgccgagcaagattccgggctgaagctcaatcttcatccgcgcgcccatgccagcatcaacactctgccgctgccggttgaacgcgtccgactgctgatcggcccggaaggcgggctgtcggcggacgaaatcgcgatgaccgcgcgctatcagtttactgatattctgttaggacctcgcgttctgcgtactgagacaaccgcgctcaccgccattaccgcgctacaggtgcgttttggcgacttaggatgaagcgttaacggagaaaataatgatcaagctcggcatcgtgatggaccccatcgcacacatcaacatcaagaaagacaccagtttcgctatgctgctggaagcccaacgtcgtggttatgaacttcattatatggagatggccgacctttatctgattaacggcgaagcccgcgcccgcacgcgaacgttgagcgtggagcaaaattacgataaatggtacgagttcggcagcgagcaggagattaaactcgccgatctggacgtcattttgatgcgcaaagatccgccgtttgataccgagtttatttatgcgacctatattctggaacgcgctgaagaagaagggacgctgatcgtcaacaaaccgcaaagcctgcgcgactgtaatgaaaaactgtatactgcctggtttgccgacctgaccccggaaacgctggtaacgcgcaataaagcgcagctcaaagcattttgggaaaagcacggcgatatcattatgaaaccgctggacggtatgggcggcgcgtccattttccgcgttaaggaaggcgatcctaacataggcgttattgccgaaacgctgaccgagctgggcaaccgctactgcatggcgcagaactatctgcccgctatcaaagatggcgataagcgcgtcctggtcgtcgacggcgagccagtgccttactgcctggcgcgtattccgcagggcggcgaaacccgcggcaacctggcggctggtggtcgcggcgaaccccgtccgttgagcgaaagcgactgggaaatcgcccgccgcgttgggccgacgcttaaagccaaagggcttattttcgtcggtctggatattatcggcgaccgcttaacggaaattaacgtgaccagcccaacctgcgtgcgtgaaattgaagcggaatacccgatctctatcaccgggatgttgatggacgccatcgaagcgcgtctggcgaagtaaaggtttattgcccggtggcgtgcgcttaccgggcctgagcaattacgccgccccggtcggataaggcggcgcatcagcatcgccatccggcaatctattgcccgataaggcagccgtcctttggcaaaagacggcttatatgagtgacaaccgtccgctttccccacatactgaacgctgtcgtttttttgaaccaggaaacagaacctctgacaatgaatttacagcatcactttcttattgccatgcctgcgctccaggacccgattttccgccgttccgtggtgtatatttgcgagcacaaccaggacggcgctatggggattattgttaataagcctttggaaaatctgcaaattgaagggattctggaaaaactaaaaattacgccggaaccgcgcgattcggcaattcgtcttgataaagccgtgatgctcggcggcccgctggcggaagatcgcggatttattctccatactccgccgtcacgtttcgcctccagcattcgtatctcagacaataccgtgattaccacctcccgcgatgtgctggaaacgttaggtacccaacaacagccttccgatgtgctggtcgcgctgggctacgcctcctgggataaaggccagcttgaacaagagttgcttgataacgcctggcttaccgcgcccgccgatctcaatattttgttcaaaacgcccattgccgagcgctggcgcgaagcggcaaaacttattggcattgatattctgaccatgcctggcgttgcggggcacgcctgatgagcggcaccttactggcctttgacttcggcacaaaaagcatcggcgttgcaataggacaacgcattaccggcaccgcccgtccgcttccggcaatcaaagcacaggacggcacgcccgactggacgctcattgaacgtttgctgaaagagtggcagccggacgaaattattgtcgggctaccgctcaatatggatggcactgaacagccgctgacggcgcgcgcacgtaaattcgccaaccgtattcatgggcgtttcggggtaactgtcacgctgcacgatgaacgactcagcaccgttgaagcacgctccggtctgtttgaacgaggtgggtatcgcgcgctgaacaaaggcaaagtggactcggcctccgccgtgattatcctcgaaagctattttgaacaggggtattaaagccgtttttgtcagcaggcgggtaacgcggtcacggttgccaggcttactgggcaataagctggtttagtgccttcagcgcctgtaaacgcgcagccgcctccgcctcatcaatccgccacattcccgcaaaggccagcgctgcggcgtgcttgcctagcggttgcgccatagaaacttcaccatcagcgtgatgccacagtacgtatccccgctggcgctgctgcgccacatgcggcgccagattacgccattgctccggagtaaaacgctgcattagcgcctcatcgctttctgccgccagtaacgccaccccaggtaccgactgccaggcagggtacatgcgaaaccccgccagcgcctgacttccctgcgaacccggcgtagagtgataaatatagataatctggtcttcccatagcacgcctaatgccaccacgatgtctttgggcgcatggcgctcaaggataggcaacgcatgggagaacagcgctgaaccgcgaatcgcctgcgccgccaaagcatgaatgcctggcccgggtaaatagcgtcggtgctcatcctgcatcgtgagtccaatagaggccatcgtcattaacaggcgattaacgcgcgtggtattaatatccatcagccgggcaagctcgcgacatccgatagcacggtcgctggagaccagatattgcagacagcgaatgccatctatcaggctttgattcggttgtgatgacatcgttaaatggcttcgctgtggttttaacaaagctgcgattttaacgccggttcgccaggatacaagcctgcatgccgttcaatccaccgcgccagtcaacactttacaacccccctacgccgccatcttcgctacagtcgtccctgcgcctgacgccattgcgcgctctgggcgaatgtcatcatcccctgctgctgcccggtttgtatcacgtgggccaactgatggagtttgccttcacggatcaaattccctgtggctggcgtattaatcagtaattcaaacaacgccacgcgcccatcctgtctgtcgacctccagtttttgtgatagtacggcgcgcagactacccgccagttggctgcgtaccggttctttttcctgcgccggaaaactatccactaatctttccaccgcctgcgccgcaccgcgagtatgcagggttgccagtaccagatgccccgtttccgccgccgtcagcgccaggcgaatggtctcgctgtcacgcagctctcccagcaaaatgacatcaggatcttcacgtaacgctgcgcgcagcccggcggcaaaagtggcgcaatgctggccgatttcccgctgctgtatcaggcaacgcttgctggtgtaacggtactcaataggatcttccagcgtcaggatgtgtttatcggcatgttgattaagatatcccaccatcgccgccagcgtggtggacttcccgcagccagtagcgccagtgaccagaatcagtccgttctcgctggcaagcagtgcgggtactatcggcggcgtctggattttcgccagatcaggacagcgctcgggcaatagccgtagcgccagcgacgttccctgttgatgtgtgaacgcactggcgcgcaggcgccgcgtgccagacagcgagacggcgaaatcaagctggccgtgcgttcgccactgatattgttgcgcatcattaagccaatcaagcagaagcctgtcgacatcaggcgcggtaaaaggcgcgttctccatgcgtccttgtttgcgccatcgcgcaggccaggcgttacacaggtgtagatccgagacgttatgctttacactaagcgtcacaatttcttccatattcatataaacatcctcggaaaatgaacgatatcgcgcataacctggcatacatccgggacaaaatctccgccgcggcgacgcgttgcggccgctcttcagaagaagttacgttgcttgcagtgagtaaaaccaaacctgcgagcgacatcgcagaagccattgccgccggacaacgggcatttggtgaaaattatgtacaagagggggtggaaaaaatccgccactttcaggaagcgaaagtggaaggcctgcactggcactttattggccctttacagtccaacaaaagtcggctggtggccgagcattttgactggtgtcataccatcgatcgcttgcgtatcgcctcgcggctgagcgaacagcgtccggataatctgccggcgctaaatgttctgatccaaattaatatcagcgatgaaaacagcaaatcaggcattccgctggcggaactggatgagctggccgctgcggtggctacactgccgcgtctgcggcttcgcggactgatggcgatcccggctccagagtcagattatgtaaggcagtttgaagtcgcacgtcaaatggctgtagcatttgccgggctgaaagcgcgctaccctgacgttgataccttatctctgggtatgagcgacgatatggaagccgcgattgcggcaggtagcacaatggtgcgcatcggcaccgctatctttggtgctcgtgattacacaaaaaattaaggaaaactgaggaacgccatgaatacgttgaccttcctgctctcaacggtaattgagctgtataccatggtgctattattgcgcgtgtggatgcagtgggcccgctgtgacttttacaaccctttttcccagttcgtggtgaaaattacgcagcccatcatcggaccgctgcgtcgtattatcccgccaatggggccgattgacagcgcttccctgctggtggcgtttattcttagcgttattaaggcgatagtgctgtttaaggtaattacgtttcaggcgattatctggattgccgcggtgcttatcttgcttaaaacaatcggcctgctgatcttctgggtgctgctggtcatggctatcatgagctgggtgagccagggtcgtagcccgattgaatatgtattgattcagcttgccgagccgctgctcagcccgattcgccgtatactgcctgcgatgggcggcatcgacttctcgccgatggttctggtgctgctgctgtatgtcgttaatatggggatcgctgaagtcttacaagcgacaggcaacatgttgctgccggggctgtggatggcgttatgagtgctgtgactcgctgcgaagacggtctggtgttacggctttatattcagccgaaagccagccgcgatagtattgtgggtttacatggcgacgaggtgaaaatcgccattaccgccccaccggttgacggtcaggcaaacagccatctgaccaagtttctcggtaaacagtttcgcgtggcgaaaagtcagatcgtcatcgaaaaaggcgagctgggccgtcacaaacaggtaaaaattattcacccgcaacagatcccgccggaaattgcggcgttaactgagtaggtactccatgcaaaaagttgttctcgcaaccggcaacgccggtaaagtgcgcgagctcgcgtcgctgttaagcgattttgggcttgatgtggtagcgcaaacggaactgggcgtcgattccgcggaagaaaccggcctgacgtttattgaaaacgcgattctcaaagcgcgccatgccgccaaaatgaccggcctgcccgccattgccgatgactccggtctggccgttgacgttttaggcggcgcgccgggtatctattccgcgcgctattctggcgaaaacgcgacagatcagcaaaatctggaaaaactgctgcatactctacgggatgttccggacgacaaacgccaggcgcgattccattgtgtactggtttatttgcgtcatgcggaagatcccacaccgatagtctgtcacggtagctggcctggcgtcattactcgccaggcggccggaaatggcggatttggctatgatcccattttcttcgtaccgtctgaaggcaaaaccgccgcagaactgacccgtgaagaaaaaagcgcgatttcccaccgtggacaagcgctcaagctgctgctggatgcgttacgcaatggctaaactaccgccgctcagtctttatattcatattccctggtgtgtacaaaaatgtccatattgcgacttcaattcccatgcgttgaagggcgaggtgccacatgacgactacgtccagcatctgttaaacgatctggatgccgacgtcgcttgggcgcaagggcgtgaagtaaagaccatttttattggcggcggtacgccaagcctgctttccgggccggcgatgcaaacgctgctggacggcgtgcgtgcgcgcctgaatctggcggcggatgcggaaattactatggaagcgaaccccggcacggtcgaagccgaccgcttcatcgactatcagcgcgccggcgtaaaccggatctccattggcgtgcagagctttagtgagcctaagctgaaacgtcttggccgtattcacggtccacaagaggcgaagcgggcagcaagactggcaaatgggcttgggctacgcagctttaacctcgacttgatgcatggattgccggaccaaacgctggaagaggcgctgaacgatttgcgacaggcaattgcgcttaatccgccgcatctctcatggtatcaattgacgattgaacccaacactctgttcggttcgcgtccgccggttttaccggacgatgacgctctgtgggatatctttgagcagggccaccagttattaaccgccgcgggctatcagcaatacgaaacgtcggcctatgccaaacccggttatcagtgccagcataatctgaactactggcgctttggcgactatctggggattggctgcggcgcccacggtaaagtcaccttcccggacggcaggatcctgcgcaccaccaaaacccgtcacccacgcggttatatgcagggacgttacctggaaagccagcgtgacgtgagtgatgacgataaaccctttgaattctttatgaactgttttcggttgctggagcgcgcgcctcgcgccgaatttgtcgattataccgggcttacggaagcggttattcgtcagccaatcgacgaggctattgcccagggctacctgaccgaatgcgagcaatactggcagattacccggcacggtaaactgtttttaaactctcttcttgagttgtttctcgcggaataacaaggataagcctgtcgcgccagcgggtaaaatacctgatggcgcgacgcttaccgacctgtggcggttaatgcgccgccggcaaacgcattatttaataacccctttacgacgcaaatcgtccgtatcttttttccagcgctcgtaaccgtcattaatatccataattttcacacggatatcactctgttgcatctgaagtttctgtaccgctatattcagcggatattgccctttctctaacgttatccagtcattctgcgcttttcgacgcagctcttctgatttcaaaaatacctgccgccgttgctcgtgtatgtctaaatctcttttctgctgaatagccgcttcattgcacggctcactctgcttacggcacgcgtctaatgccggttgatagacctctttttcgtatttctcggcatatacgctgctatcgttggcttttacataatcatcgcgctcttttaacgtctttttaaacgcctcggcgcgggtcaacggtttcccatcagcgccttttccccaatacgcgtccgcttcttttttagctaccgctattttcttatccagggcagagagttgttcttcaagaccggggatcgacgctttctgcgcacgccaggaggcttcaatgttgccaaaccgatagttaaagtcatcactgttgacgatcaggtatttatcattcgttttaatgtcgtcaatagcccggccctgatcgctggctgccatttgtaatgagtaatagttcaccgtccagccagaggctggcgtccctttactggttaacatggcagaaaatttaacgggacgatctttggtccaggttttttcaacaaaataataatccgccgccataccaacgccggtatacatatcttcacgggaagaaatatccccttcggcagaccaggtggcctgattgcccgtcgaatcaagattttttaaggtaatggaatccagtttaagtatgccgtggtactgcttactaaactgttcttttaagatgttatcggagggttgagcaacctctgcccaactatagcctgaaatcagggcaaacagcgctgcgccagcaatccattgtcgaaccacttgtggacctcccgtccagagacatgacacccacgattatcataaccaggatgataattagcaagataatagtgttggttgtgcgagaggtcttccaaagatagccccggccttccgaccggggcattatctttaatactgattgaacatcgtctggatctgttttggatctttagtctgggttaacgccagttgcagtaagacacgcgctttttgcgggttcagcgtgccggaagcgacaaagccgtattttgcatcgtcaacttccgcatcctgcgtggttgcgccagtcggcactcgtgaagaacgcaccactaccgtaccgttgtgcgcggcggtcgccagggtatcaaagaccgttttatacaggttgccgttacccactcctgcgctcacgatcccgtcataacccgcgtctaccagcgcttttgccggcagatcggacgcattcgcatagttataaacgataccgactttcggcaacgcggtcagcttcgacacgtcgaacggggtggaggtggtatgtttacgctctggcgtacgctggtagtcaattttaccgttgtggatataacccagcgggccgtagttaaccgctttaaacgtcgccacgtcagtcgtattggtcttagtgacgtcgcgtccgtccatgacggtatcattcattaccaccagcacgccgcggttggcagactgtttatcagccgctgttactaccgcattatagaggttgaacgggccatctgcgctcattgacgtggaaggacgcatcgcgccgaccagtaccaccggtttattgcatttcacggtcagatcgaggaaataagcggtctcttccatcgtatcagtaccgtgggtgatcacgaaaccgtcggtgctgtcgcactcggtattgatttttttcgccagcgtgagccagacttcatcgttcatatcctgcgagccaatgttaacgacctgctcgcctttcactaccgcaatgtccttcaattgaggaacggcatccaccagattttcgacgccgactttacctgccgtataatttgattttgttgctgaatcaccaccgccagcgatcgttccgccggtcgctaagatggtgatattcggtaaagcgaacgctgcgccgctgaaacccattaccagagcagctaatgccgttttcctgaaaaactccatgttatatctccagttatgtcaactggtcgcattatctctatattgcagacgaataatgtgacgccatacgattaaccagcgatatatatccgacagagagtattttttagagatggataacaaaatgcaggaaaaaacagaataaaaaggcgcagatacgatctgcgccattgtttaaaaaggaaagattacttcaggctgccaaccagcgctttgcggctatcttctaaggtcactacgcggctacagacatctttgccaaactgctggaaatctttctcctggtttttccattcgttctggatagcggtttgcaaaccacctagactgcccatcacgccctgtaaaggattgccgccgcctttaagcaccgctttggcgcccatttcgttaatgctgtcctgcaaaataccgcccatcgcctgattcaccaactgctgaccgtcggcacgcacctggtcgatagccttatagtggaacgtcaggccgtccgtacgatgttcgataatgcggttcatttgcgcttttaattgcgcatcaagcttcgtcagacggctacgcatgttgctgctttcgcccacctctttagcgatgattttatccagcgccacgcggcctttttcgacgcgcgatcgggcgccctcatcaatccacggcagcgcgcttcgcagttccgcctggtaatctttcgcctgctcgcgctgcgcggcgctaagggtgtactgcttaccgttgtacatcacattgccgtccggcgtgatcaccaggttgccgttttcacctttcacctgcaccgtttgtggactcaggatcacatcgtcacgcggcgtgacgctgcatttgtaatctgcatgagcggccatcgccgtaaacgttagcactgtcgccagcagcgttttgcgcatcataactttccctcaagacaaagcgggccggcatttgccgaccctgtacttattagtcccaccaaacgtcgaaaagttcgctggttcggacttcttcaaggttgcgcgcttccagccacttacgcacaatcgcctgatgttcttcggtacatttaccgatttcctgcatacaaatcagcccttcccaggccaggtagccgctgccgtcaaacgccagtttattaggctcaataacgtcattaataaagtcatcgacagtcttatcgacctgctcttcagatgtaccttccggaaaacgccatgccaccgaaaatcctaattcctggaattcgtcaatgtgcatttttttacgcagacgacgactacggttctttgccattatttcaccctctcgaacattaagtcccatacgccatgaccaagacgatggccacgttgttcaaatttcgttaccgggcgcgattccgggcgcggtacataatcattgctctctgacagatttttgtacccgtcgatagaagacatgacttcaagcatgtgttccgcatacgcttcccagtcggtcgccatatggaaaacgccgcccaatttcagcttgctcaataccagttcagcaaacggcacctgaacgatacggcgtttattatgacgcgctttatgccacgggtcagggaaaaagagctgaaccatcgataaagaattgtcaggaatcattttatgcaacacttctaccgcgtcatggcacatgacgcgcaggttttcaacgccctcttcattagcggacgccagacacgcgccgacaccgggtgaatgcacttcaatgccgaggaaattctgctccgggcgcgctttcgccatcgccacgagagacgcccccatgccaaaaccaatctccagcgtcaccggcgcttcgcgaccaaacaacgtggcgaaatctaccggcgcttcgctgaactcgacgcccatcaccggccagtagttttccagcgcgtgctcttgcccctttgtcagtcgcccctggcgacgaacaaaactacgaatacggcgcagcgggcgaccgttttcatcaaattccggtgaaatgacgtcgtttttcataaaagtgtagtctgctgtgtttgagttctgaaaacgggcattatccaaagttagttgccggatgcaagcatgaagcgcactgcggaaagttccggtttacaccctgcggcctctgtgctgcaatcttgcccccggcaataatgaatgagtttccatgcaagcgtctcaattttcagcccaggttctggactggtacgacaaatacgggcggaaaacgctgccctggcaaattaacaagacgccttacaaagtatggctctcggaagtcatgttgcaacaaacgcaggtgacgacggtgattccttactttgagcgatttatggcgcgctttccgacagtgacggatttagcgaatgcgccgctggatgaagtgctccatttatggaccgggctcggctattacgcccgcgcgcgtaatttgcataaagcggcgcaacaggtggcgacgcttcacggtggagaattcccgcaaacttttgccgaaatcgccgcgctacccggcgtcgggcgctcaaccgccggcgcgattctctccctcgcgttaggtaaacattatccgattcttgatggaaacgttaaacgtgtgctggctcgctgttatgctgttagcggctggcctggaaaaaaagaggtggagaatacgctgtggacgttgagcgagcaagtgacgcccgcacgcggcgtggagcgttttaatcaggcgatgatggatctgggcgcgatggtttgtacgcgttcaaagccaaagtgcaccctgtgtccgctgcaaaacggttgtatcgccgctgcgcatgaaagctggtcacgctatccgggcaagaaaccgaaacagacgttgccggagcggacgggttactttttattgttacagcataatcaggagattttcctggcgcagcgtcctcccagcggtttatggggcggactctactgctttccgcagttcgccagagaagatgaattacgtgaatggctggcgcaacggcatgttaacgctgataatttgacccagcttaatgcgtttcgccacacatttagccatttccatctggatattgtgcctatgtggcttcccgtgtcgtcactggacgcctgcatggatgaaggcagcgcgctctggtataacttagcgcaaccgccgtcagtcggactggcggcccccgtggagcgcttgttacagcagttacgtaccggagcgccagtttaacgccccggtcgatgaagaggatgacttatgagcagaacgattttttgtacttacctgcaacgcgacgctgaagggcaagattttcagctctaccctggcgaactgggaaaacgtatctataacgagatctctaaggacgcgtgggcgcagtggcagcataagcagaccatgttgattaacgagaaaaagctcaacatgatgaacgccgagcaccgtaagctgctggaacaggagatggtgagcttcctgttcgaaggcaaagacgttcatatcgaaggttatacgccggaagataaaaaataggcccgttgctgaatgacgctgcgcttattcggcctgtgagttatgccggataagcccttagcgtcgctgcccggcaacatggcataacgacaacacaacatgcactcccggaatgatgaaaaaattactcgcgcttgctgttattgcgccgttgctcatctcctgctccagttcgaccaaaaaaggcgagacgtataatgaagcctgggtcaaggataccaacggctttgatattttgatggggcaatttgccaacaatattgaaaatctgtggggatataaggaagtcctgattgccgggccgaaagactacgtcaaatataccgatcagttccagacccgtagccacatcaactttgatgatgggaccattaccgttgaaaccatcgccgggacggaacctaccgcacatctgcgccgggctattattaaaacgttgctcatgggtgacgacccaacctccgtcgatctttactccgatgtcgatgacataaaaatttctaaagaacccttcctgtatggtcaggtcctcgacaataccggccagcctattcgctgggaaggccgcgccacgacattcgcggattacttgctgaaaacgcggctcaaaagccgcagtaacggcctgcgtattatttacagcgtcaccattaatctggtgccgaaccaccttgataaacgcgcgcataaatacattggcatggtacgccaggcctcccgtaaatacggcgttgacgagtcgctgattctggcgattatgcaaacggagtcctcgtttaacccgtatgcggtcagccacgcggatgcgctgggcctgatgcaggtagtgcaacacagcgccgggaaagatgttttccgttctcagggtaagtccggcacgccaagccgtaacttcctgttcgaccccgccagcaatatcgataccggcacagcgtatctggcaatgttgaataatgtctatctgagcggtattgagaatccgacgtcgcggcgctatgcggtcattaccgcctacaatggcggcgcaggcagcgtattacgcgtattctcgaacgataagattcaggccgcgaatatgattaaccgcatgtcgccgggggatgtgtaccagatattaaccacccgacatccatctgcggagtcgcgccgctatctgtataaggtgaattccgcccagcgatcgtatcgccgccgataaaccatcgcatcccgcctctggttggcaaatgacagaggcgggaaaggtaaaagtgttaactccgtcacccttttgctttgcaatcagaaattgtttgcaaatatttgtcacaggtaacaaaaaaagcccgcctctcattgatagaatcacaccaaatcacaacggcaaatgtgccttttaaaacattcatccgctctcaggtgtgaggaaattaacatgaatcttaagctgcagcttaaaatactctcttttctgcagttctgtctgtggggaagctggctcactaccctgggctcgtatatgttcgtcaccttaaaatttgacggcgcatctattggcgcagtttatagttcactggggattgccgccgtctttatgccgaccttgctaggcattgtggctgaccaatggcttcggctgtatcctgggcggcattgtgagcggtaaagtggtggagtattacactcaaaacggcattaccgactggcagaccgtgtggctcatcttcgcaggctactcgctggtgctggccttcgcgttcgtagccttgttcaaatacaaacacgttcgcgttccggcaagttcgcaacccgttgcacattaatccttgccctgtttcgcaggccggataaggtgtaaatgccttatccggcctgcaggcaacgttactttaaaacatatccgtacaagcgttgaattccatcggcatcggtctcgctatataccccctgcaattccggcgaaaaaccaggcaacagattgatgccctcttccagcgccaaaaaataacgctgcgccgcgccgccccaaatctcccccggcaccacgcacagtacgcccggcgggtatggcaatgccccctcggcagcaatacgcccgcccgcctcgctgatacgcaccagctctacatcgccgcgaataaaggcgctgttggcatcctgtgggttcatcgccacatgcggcaggctttctttgcggaacatcgctttttgcagatccttaacgtcaaagctaacgtacaggttgtgcatctcctgacatagctcacgcagggtgtaatcgcggtagcgcaccgggtatttctgaaaaaccgtcggcaatacatccgcaagcggcgtatcgtcttcaatgtgccgttcaaattgcgccagcatcgcgaccagtcgcgccagcttctcttcgctctcggcgggtgtcagcaagaacagaatcgagttgagatcgcacttctcaggcacaataccgttctcacgcagatagtgggcgagaatggtcgccgggatgccgaattcggtgtatcgcccactatcggcatcaatacctggcgtggtcagtaacagtttacaggggtcgacaaaatactggtcatccgcatagccctcaaagccatgccatttcgccccgggttcaaaactgaagaaacgacgattgctggcaatggtctccgtcggatatgcctgccacggcttgccgtcaaccaccagtgggataaagggctgaagcagtttgcaacgggcgagaatggctttacgcgcgtcaatgcccagcgcaacgcactccgcccacaggcggcgaccgctctccccttcgtggattttggcattgacatccagcgccgcaaacagcgggtagaacggactggttgaagcatgcaacatgaaggcgttgttcaggcgtttgtgcgggcaaaaacgcgcctggccgcgaatatggttatcttttttgtggatctgcgaggtttgtgagaaccccgcctgttgcttatgtaccgattgggtcacaaagatcccagggtcgttttcattaagctccagccgcaacggcgaggtatccgccatcatattgataaactgctcatagcctacccacgcggagtcaaacagaatgtaatcgcagagatgcccgattttatccaccacctgacgggcgttgtaaatagtgccgtcataggtacccagctgaatgatcgccaggcggaacggacgcgacgcatcggcgctttccggcatcacgtcacgaatctggtcgcgcaggtacgtttcatcaaaacagtgcgcatcaatgccaccgataaaaccaaacgggttacgcgccgcttcaagatagactggcgtcgccccggcctgaatcagggcgccgtggtggttggatttgtgattattacgatcaaacagcaccagatcgccgcgcgtcagcagggcgttggtgaccactttattcgccgccgaagtcccattcagcacaaagtaggttttatccgcattaaacacttttgccgcaaatttctgcgcgtgtttggcagaaccttcatgtattagcagatcgccaagtttcacatcggcgttacacatatccgcacgaaacaggttttcaccaaaaaagtcataaaaatggcggcctgcgggatgttttctaaaaaattcgccatgctggtgccccgggcaagcaaaagtactattccccatgtcgacatactgggtcagggtgccataaaagggcggcagaagttccgcttcgtagcgacaggcagcgttttccagctccagccattcctgcgcgttcccgactattaccgccgtaacgccgacaggcgcgctgacgggttcatccgcaagcataaacaccggcaggtgaaaaccggtgcgtttaagcaacgccagaataccgctacggctgtcggcagtggtaatgacgactgcggccacatcggtaaagtcggtactgtccagcgccactacgtttcggtgggtggagagacggggaatgagttcaccgctggcggcaatattcattgatttcataagcgcaaatatccgtttcgggagtagagtaaccccagacaaggcccgatgccttgcccaacgagatgccgggtcaaactggataccagctccgaccgccagacatcagtaaaaacagactgtttctgattttactgttgtcctgcagtgagcgtgcgctgccctcaccgcatagcggggatgacaaaaaaaggaaagaaaggggcaaacctcgcgcagtcaggcgacagtgaagacaatataaaggcgctatgttcatcccggcgagccccatgctggcaggagaaatttcgcgcaatcatggcacctttcaccaggcggcgcaaggtaaaatcagcgctctatacgtcacagataatcaagctattaacagcttaatcgcgtgataataaggcaatttgaaagacaaataacaggagtcattgtggtaattggaccttttattaacgctggcgcaattttattcggcggcgttattggcgcgctgttaagtcagcgtctgccagaacggattcgcgtctcaatgacgtctatttttggtctgtgctctctgggaattggcattctgctggtgatgaagtgcgctaatcttccggtgatggtgctggcgacgctggtcggcgcgcttatcggcgagttttgtttgctggaaaaaggcattaatggcgcagtcgcgaaaatccaacaattatttatggcatcgggtaagaagccgacacacgactcatttattcaaagttacgtcgctatcattgtacttttttgcgccagcggcaccggtattttcggcgcgatgcatgaagggatgaccggcgatccaaacattttgatcgctaaatcttttctggattttttcactgccattattttcgcctgttcgcttggcatcgccgtttcggcgatttgcgcgccgatgttgattatccagttaacgcttgccgcctgcgccaccctcattcttccactgaccacgccggcaatgatgggcgactttagcgccgtgggtggactgctgctggtggctaccggcttgcgtgtatgtggaatcaaaatgtttccggtagtgaatatgctcccggcgctgttgctggcgatgccgatctccgccgcatgggcgatgttttttgcctgattctgcgtgcaataacaacaaagtggtgatagattgtgcagtctacgttgatttgaagaaatttcgttgacgaagcgaggcgattacggtttaatgcgcctcgttgcccggatagctcagtcggtagagcaggggattgaaaatccccgtgtccttggttcgattccgagtccgggcaccactttcccttttttatgctttcttatgaattcctcgatgtcttcaagtcaataagtttgaacatagactctttccagaaattattgccatatgatctccattagaccaatataaacggatgcgtgatcataataaaggcagtaatagtaagttttaacattaaacatactgcgaaatttcaattaagtttccatcagggtccctgatgtagatagacattatctcgcctgtggctccagttctctcaaccgggccttcaacaatggaaatgcctgcctgtaagatctcagacacaacatcatttatcggtgtcgatgtaataaaacataaatcggcagatcccggcgttggtctactcgcttttggttcgaactccatttcttgctgatggaggttaattttttgcgctccaaatattaacgcttttctgttttgtttaaatgttaccgcagaaaaaccaagtacctcttcgtagaatcttattgtggttgatatatcagataccgttaatacaaggtgatcaattctgtcaattatcatttgaatagactcatgatgtttatattttagggatgctacattaaaaaatagcattaacctacttttaaatcagatgcattttttttgcatctactctaagttgctgccgaaaattgggatgtgccaattcaatgatgctgagcgcacgctcggttgaagagagccccttcaggtttacggagccaaattcagtgactatccagtgcgtatccgttcgtggggttgttacaggcccctcaaggcggggaacaatacgagaaatcgtatcattcgcggccgttgagcgggtcgtaataatggaacgacctcctttagatgcatatgcgcctctgacaaaatccaattgccctcctgaagcgctgtactggtgtccaagcaaatattcagagttacaggcaccagtgagatcgatttgtaaggtagcgttaatggagacaacattctcattttgcgcaatgatccccggatcgttaacataatcgacaggccgactaaaaaaagaggggttgtcgttgagatagtcatacatatccttttgtcccatagcaaaagtaaatacagacattccccggtcgatatttttacgctgattggtaacgacgccttgttgaatcaaacttaccaaccccggattcagcgcctctgtatggacccccagatcattatgttccttgagcgcattacagatgagctccggtaatgcgccgacccccatctggagacaagcgccatctggcacaagagaagcgataatctgactgatagcaatatcttcggctacggcagtacgtattggtagttcaattaaagggacatggttttcaacaatggcgtcaatttctgaaatatggattgcagcaccttctccatgaacgcgcggcatatatttgttaacttcgacaataagctttttagctgtcctcgcaatccgggtggaataatcgtttccagttccaaaattaaaatagccatacttatccataggggacacggtgtgaataaaggtatcaataccaatatcatcagctagtaatcgcgtcgcctgatgaaaatttgaaggtacatagttaactatttttcgcccggaactctcaatcccctgacgtattaaagcccgttcaataccggtaataaacatactgtagagatgaatatagtcacttagctcataacggaaaatagtgttcccggcaatgctggctgtttcataacagtaaacccgcagatcgttgatttctccccttttcgctcgctttgccagcgcattcagcaaagctggaggctctgctgcaaacattcccatagagaggtgactgccggaggtaattaaagtaaccgcctcgtcaggcgtcacgcatttttcggcatacactgcattaacattcatcatgactctaaacctcagggcgatttctcaataagcggcgtcttcttcaggcgaacatccacagcaataaactaacattgttcgttcgaagcgcatgacctctacaccattctggttaataccacatgtccgaacggtaacgatgccttgtcccgggcgactatttgacaggcgtttgctgagtacagtgctttcagcataaagtgtatcccctgcgaaaaccggatggacggcttgtaccttatcccagccaagattggccacgaccttggcgctgacagtacgcacgctcataccggttaaaagcgccagagtgaacgttgaatcaaccagtaactttttccattccgttttgctggcgtaagccgcatcgaaatggaccggctgcacattgagagtgagcagggtaaaccacacattatcggcgtccagaaccgtccggccgggacgatgttcaaaaacatcaccgggatgaaaatcctcccagtaaagacccgaaatttctcggtagcgcccctcgctaatggttttataagcgggtaataacgtgttcataatcaattcctctgttaataaaatcaggaaaagatccctgcccgggcgagtaatctccgggcctgacgggcaacggctgcatctatcatcatgccgctaacgatcccgacgcctttggcattctctgtcagtactgcacgagcatgattaatttctgccgttgtaggagtaaatgcggcgttgattacactaatctgagcggggtgaatagccgattttgcagaaaaaccaaaactgagcgcctgcagcgtttcctctttcagacctgaaaaatcgcctatatcaaagaagggagcatctattgcaagaagccctttcatagcgcaggcagccactattctggcccgcgccagcgcaagaggctcccaggcgggtgtggcgccaatgtcagccgccatatctgcggcgccaaacatcaacccgcagagtctgggggtggcgtccgcaatagactctacggcattaagcccaacaactgactcaataatgccaataaggcgagtatcagaaccagccatcatgataagactatccacgatttgcaggtgcgcggctgactctgtttttggaagaataatgtaatcaggaaaaaaacggcattccagtaacatatgcaggtcttcaatgccagcatgagtattcattccattaattcttaatgctattttcagcgatgagtttggtcgggatgaaaggaactgcatcgcaattttccgggcctgcgccttgtcattcggggtgacggagtcttcaagatcgataatagaaatgtccgccgcactttcaactgcttttatgaaacgttctggtcgaattgctggggtaaaaagccagctacgtgtcggtgtatgagaaatatcgggcatattgcacctcctgttaacctcactatgcgctcgctggtttcattcttccaatatatgatggtgccattcttaattgcttttggagatgaggatggaactgcgccatattcgctattttctcgccgtcgctgaagagcggcatttcacgcgggctgcgacaaaattaggcataggtcagccgccgctaagccaacagattaaggatctggaaagagagctgggagcgcagctattccggagagtgcctcatggcgcggaattaaccgaggctggaaaagcattttatgatgttgttaaagggatgcctgctaccgcgacaagagccgtgctggcggcgcagcgtgtcgccaggggggagtcgggcgtgttaagggtgggttttactgcctctgcggcatttaacagtgtggtgcccggcgcaatccgtactttcaagcgggcttatcctgacgttcgtttgcagcttgaggaaggaaatacaacccaactggctgatgaattgaatgaaggatcgctggatgttgcctttctgagacccggttttacaggcaatgaacggttccagctcaggttactgtctgaagagccaatggttattgtgctggcagaaacgcatcctgctgcggcgtgtaaacagattgcactctcgattctcaaagatgagttttttttactcttcccacgtgaaatcggcctgtcgctttatgacgcagtgatcaaggcctgcggtaaagcgggctttgaaccgaaaattggtcaactcgtgccgcaaatttcgtcagtcattaaccttgtgtcggcagagatgggcgtgtcgatggttccagattcaatgagacaggttaatgtcaagggagtagtataccgccccgttgcagaccagatgcccgtcgcaaaactggctctggcataccggcgcggcgatacatcgccaacgctgagaaacttcatcctgaaagtcactggctgaatgcggttatgtgagcgttgaataatcatttgaaacgtaaccaataattattggtccgattttgtgtctaaaggaatcgctaacggagcaggaactggctgcaatgtctgtggatcgacagccagataacgcccggttttactgtcgatacccacataatcgataagcttgcctttggcataaagcaccattgtctgttttgcaaatgcctcatatgcgctgctcagtattttcactttatccgcataatttgctgcgagattatgcgtttccagggggtcacgttgcaggttgaataattcccatggcgcattacccgcctgtgggaatactgtgacaagacgacgcaatttccattccccatctatccaggccgcctgattatggagttcaacaccatattgtgtgcgaggcgcgtgcagactttcaccggtcagatagcgtttaaaactcacgccgatcattggcagtgtcggtctttcagataatgatttactggcatcaatacctgcaaattcatagagcgtgggcgcaacatcatacgccgccatcgtggcgttatctatggcgccatgatggatgataccaggaccggaaatcataaaactggtattaattcccccctgaccgctggtcgttttgtgatagcgaccataaggcgcattgctgacatcagcccagtggggaccataagagataaatgaatttttacgaccaatattttcgtaacgattatcgaattgcttccaaaaatccggttcagattcatagtgaaagccctccgccggattcacaccattatcacttaagaagaccagaatcgtgtttttatcgcgcccggtcttttttaacgtctcaataacggtgccgatctgtgcatccatattggcgatcatagcagcgtaaacctgcatcaccttcgccgtatatttctgctgttccggggtcatcgcctgccattctttatcaagttccagtcctggcagaggtatgtcatcacgcaggaaacccagtttcttcaaacgagcaatacgctgacgatagacgtctgcatagccctgttcatactgacttttaaaacgactaatccattcatccggcgcctgcagaggatcatgtggcgcagtaaaggccaaccacgcgaagataggttgttcccgtggcgtctcgctgatccagcgattaatctggctggcataggcttcgctggagtaaaaactggagggcagtgaaatgcgctgattgtcacgggtataataggtatgaaatatctccacggttcccagcggcacggcatcatcaaagtgactggcgcctccccccatcaaggcgaaagaatgacgaaagccccgatcttttggcgtcgagcctggcgtaaaaccaagatgccatttacccgccatcagcgtattgtaaccagcatctttaaagcgttcagccatggtcgtcacccgatcagtcaggcgcaattcatagccttccttacctatggtattttcataccaccacataccgcctatacccgcttgctgactggtgttcccggttaatagcatcgcacgggcgggagcagacatgggagacgtgtaatattgactcatccgcacgccgttctcagccatcgcctgcaaattaggcgttgggatttccccaccgaagggagtgatatcagaatatcccatatcatcagcgataatcacgataatatcaggacgttcgttttgcgtactgtgcgccgtaccggagaagataatgctaagtgtggcaagtgttacttcttttttcacggcttattctccatttcagactacggatgttgtacaagagcggcgggcaaatgcggcaagaggaaccatcagcccgaaaatctacccataacgtcagcacgccaggctttcagtccattcagatcccggggccaggcgcgtagcggagccagaatctccgtgaaaaaagagtaatagccgctacaaagtcggttgtagccggcactgttgatatgtgcggggcagcctccctggcagactattttcacagaacaccgttgacactcccggcgctggcttttcttaataccaaagggaagccgggttgcggaatctacggctggcgctaacgtattattagcaagctgtcccaggtaatgctggctattaatcagatgatcgcaggcatagagtttgccgtccggctccatgaccagattcgttccgcagcgggcggaatggacacaggtggcgctgatatgcgtaaaatattgtgcccatgcctgttcaatgttgatcacaaaaacccgtcccatatcgccgcgtttgcgccattgacgccagatatcaatcatgaaacgtccccagttatccgcactcaattggtaacgttgctgtagggcgttgccttcgttcatcagtggctgaaattgcagataacgaacgccaaggctaacaacatgatcgtagatggctgccgcatggcgagccatgtcatcatgcacgacaatcagtacattaaaatcgactcgatagtgttgtaacaatgtgattccccgcaacaccgccggatagctggcctcgccgcgtttgcccggacgatgatgattttgcaagtcttcactgccctcaagactgatgccaatagtaaaattattgtcgcgaaacagacggcaccaggcatcgtttaacaacgtcgcattcgtttgcagactattactgatcgtcacgccgtcaggcgcatatcgttgttgaagcgctattacctttttataaaaaccgattccggctaaaagcggttcaccgccttgccagacaaaattaatttcacgcgcactggcaggttgcgccgcaatatagcgacaaataaaaatctccagcgttgattcattcattttttctacgggcgtttcgccctgtggataataacaatagcggcaggccagattacatgcagggcctatgggctttgccagaatatgaaagggtatctgcgcgcgatattccgtcattacggggatttgttgttgccgtaatgtgttgagattcaacattattctgtcctgtagttatcatttctgatgcggagacatgactcacatttcgcaatagcgttcgtctggcgctgcgggcagaatgccgagagcaggctgtatctattgatacgccggttttctgcatagcgcatgacgctattgaaacgttatttagcaaatcctgtctgagccagaaattaagtctctgttaacctgcgctattacagaaaatcatagaacagtcgtctcaaaagaatatcgtcctgaaggacgagaactcacggcattttcaggagatgagtcaaccgcgacagaaaaaaatcatattaataattttaaattattttttagaaaaccagacaggatttaaattaaaatcatttattttcaagatgttataaaaaataccgcaacatacgtcacattattaacatgtgaatgattgtgttaaccgaatgtaaattgtatgtttcaacataccactattttactgcgccccgacgcgctcatccggatggaaggagataacatgtcagccttatcaactactggccataatgacgggatcactctccattgcttacagagcattgcgcaactcattcctctgtcgtcggcggttttttatcgtgttaatgcttatttaaagccagaagcctatgttttacataacatttctaatagcacacaccaacaatatctggagcattttcaaccattagacccgctatcgccttcccggttcggccaacaggttgttaccgtagcgacgatgacgcccggtatctgtgcccgacatcgccattattatcatgaatttatgctacctaatcatgtgtgcgacatgattgagatctttattcgtcggggccatcgtattatcgcgggcatttcattaatgcgcgatatacctttttccagcgaagagcgtttgcgagcccaggcagtacaaccattactgggactggcgattcatgattctcttcaggaagacaacgatctggagtcaatattgaccgccaaagagcgtgaaattgtgggaatggtctgcgaaggggccagcaacaaattgattgcccgtcagttgaatatttctctctcaacagtgaaaacgcatttacgtaatatttttgctaaaacagaagtgataaatcgcacggaactggtttcccgaaccagaatgtcttcggtacaacatgcacagcatatgtgaaagcgtgctttttaacccgcgtcaattgcgggtcttttccccattgtcatatatgcctgaattaataccactctctgatctgatgcctcaataaaatgtcatattatctggcgtcggtatcctgttgcagccattgattcatggcctgattgatcatatttatcacactaagcagaagaacacgctggtgccgctcaagccgcagataacggcgcagcggcggcattttacaaactacttcgctagcagcccatagctcaatgctgcaataccattccttatgatgtaaaaccagcgtaaaccgacgataatccagttcactcagtgcctgttgtaaattggggaaacaattaagatagttaatcagcccggcggtacttttgctgccagtaaaaatgacgggataacgtttcagccatccgggctgatgaacgcgaattttgccctgcaaaggataattgattgtgcctttcaccctgaattcacaactgtgaatactggccatgaataaccgtttttgctgagcatggcagataacctgggtaaatgcattcagatgcagcacggcgctatgttcggtcaatttttcacaacgccagccgctcaaatcacgtaacaccatgttcattaatgtgctcttaaaccaggggacggaggacatctggcgtcatctcttcattgtttcgcttttcataattgcccatagcccgttccacgacctcttctaccggaagcgggaggaaaggattaacccgttgcacacataatgtccagaataaggcataggcggcagtcaatccaagcataataccgaatggtataagtacatcccgactgttcattcctggaggcgcgatattaataatggcgataataatacccacgctcgaaataatctgaggtaagggaaaccagggggcccggtaagcgcgtggtaaatcggggcgccgaatacgtaagataacgaccgataacgttaccagcagataagctactccccaggcgcagaccgcagcgaggatcagcggaacaatgtggtcgatatcaccgttcagataccaggcatgtaaacagggaatcgcaacaccgaatgcgatggcgatgaccggtgttttaaagcgggggtgcaaccaggtcagaaaccgcggcaaagcgccgtccagcgccatgccgtatataatacgcggtactgccgccattagcgtattaatcgtcgcacatcccgctaacaacaaccccacgcccagccagtattgcccgacatgtcccatgacacgattggcaaaggcgggaatagccatcggcgtatccagtaaaaagatatggtttgccgcatcgaccaccacattatttacctgccggttaatcgcagcgccatagaggaacatacaacctgccaccgctaaaaggccaagcgccatcgctctgggaatcgtacgatgcgcttttttaatttccggcgccattggcgtgaccagttcacaaccgacgaacataaacatcgccatgccaatataaccaaacagaccagaaagattactgacatcaagcggtgcgccaaaccacccggaatgatgagtgaccggggataacaggatcccgcataaaccgaagatggtcagggtagtccacataccgaatgtaagaaacacttccaccttgccaaatacttcaacaccaatggcattcagtaacccgaaaaccactaccatgccgacgccaaccatccaggtattgtgctgcatggccacgtgttctctaacagactcaaagttcaccagcgccatgacgccagcgagaatcgtttctgccgtgccggcaaaaatgtgtacgatcaggtaagcgcaaagcgcaccggtgatagcgaaaaaacgccccatcccgcaggaaatatagtcgtagacggagccagtcgtgggaataagcgttgccgcttcggcaaaggtggtaatctgcgcttgcatcataataaatgccagtaataccgcaagagcaaaggtatctccccctgagccaaaaccactggtcacggtcaggatcaccgggcttgccataatcagcccgacggagctggcaagcgtcgtggggaaaccaataacgccacgttcaagatggctggcaagtctgtttttaaacatggtcaacctcttcactattattacaacaataaattaccgctccggaataacgcttatttatggcaggcaccgtatctaacaggtatcgtcctgaagagggataacggtaaataacgttgtgacgccgtccccgcatgcgctaatagcaagtggggagcgcgttattctccccagtgatgccaacgctactgacgaacaattaaaggattcaaccctgcttatggctttcaacttttgccagataatgttttacaaaacggggcgttaaaactttccatgccacttcggttccctgttcaacaaaccaactatcgcctggtgaaaaacgtatcggttcctgacccgcaacagtgagttccacttccccttccagcacggttgcgtgctcggtaaagggataaatcatagtgaaaccgccgcgggtcgatgaaaacagtccacaggtaaatacgtcctcaggtttaccgtaaatcatcgcaacggcgacctggggatcgccttctgttggcaacgcccccaacaggctgacactcccgattggctgtaattcaggaacaggttgattgagtttaaaagcttgcattaatgttctcctggttaattccggcctttccagaaaccggctgtttgatgtatcagttttcccgcactgaccagcaatagacgtagactgtcgcgaccataaattgtcgcgtggggaatgctactcatcagacgataccgctcggaaccgccatttattccttcggccaggattttgcatacaatatgggaaggcgtgacgccaaatccggaataaccctgaacataaaaaacattattgtgctcacgaagcgtgccaatctgcggaaacagattcgcgctacaggccatcggtccgccccaggcaaaatcgattttaacgtctttcaaataaggaaagacctccgtcaacagagtgcggttccaggcagcaaaatcgtgcggggtatattcaagaaaccttgtggcgctgccaaacagcagacggttttcttttgtgagacggtagtaatttatcaccgggcggatatcactaaaagccccgcgcaagggactgatccgctcaacaagctcgctggagagaggttctgtagagacctgataagaataagtaaccagcgttttcttataaatttctggttccagattattgagaaaactatcacaggcccacagcaatttggccgcttttacgctgcccatcgcagtacgtacccgcacagttttaccgtaactgacctcaaccacaggtgaatattcgaatatcttcacccccagcgaattcgcagcctgagcggagcccagcaataaattcagcgagtggacatgccctccccccatatgcttgagaacaccgcagtagacgtcggaaccgataacctgctgcacgtctttaccggtatagagttcaatatcgtcttccggcgtagcggctttgaattctttttcccattgttgcagcgtttttaactgccgctggttgtaggccagataaccatatccggggacaaaatcagcatcaatatggtatttacgaattcgctcccgaataatgcctgcgccgaggttcgagattttaaacagcgtctccattcccgctgcgcctacatattttttaacggcttcgatgtcgtgacctataccggccatcacctgaccgccgtttcgcccggtgccgccatacccaagatggcgggcttccagaacgacaacattagtgatcccctgctccgccagttccagcgcggtattgatgcctgaaaagccaccgccaatgatcaccacatcggcatcaatatcgtcttgcagagcaggaaaatgcaacgggtattttttcgtcgcgccgtagtaattcaacgcatcgatttttgtattcatcgcgttaccttgtcatcacgcttgactaagaccgctatcacagcacggtaacgttttacaaaatatcgtccggaagaatgacgttctttggaacgatattcagttccaggcaagtatgttgagatggaaaaacgtacattcctgacctacaggcacttctgatgagcgacgtgacattacttgccgaagtaacgacttttttacgccaacgacacggacaatttattgcaggtgaacgtcaggccggaaacggcacgaacttctcggtcactaacccagccaccggcaaaatcatcgccgacgttgtgtcggcaacccctgcgcaggcagaagaggccatgcagagcgccagacgggcgtttgatgtctggcgtaaaatgccaacgttacaacgcggcgcattactgctgaaactggctgatactcttgccgctcatcgtgaagagttagctcaactggaaagcgtctgttcaggtaaaacgattatgctgtcgcgcggtcttgaactcgatcagtcagtggccttcctgcgttactttgccggttgggcaggaaaaataaccggtgaaacgctgaatgtctccctgccatcaatgggagaagagagatacacagcgtttacccaacgccaacccattggcgtggtcgtcggtattgtgccgtggaatttctcaattatgattgctatctggaaactggccgcagcgctggtatgtggctgcaccatcgtcattaaaccaagtgaatataccccgctgacactgctgcgagtcgctgagctggctaaagaggcaggtttccctgatggcgtaattaacgtggtaaacggtgctggcggtgagatagcgcaacagctgatcgcgcatccagattgcgccaaagtgagtttcaccgggtcagtcgcgacaggtgagaaagtccggcgttcggcaacatcgtcaggaaaacgcgttaccctcgaactaggagggaaaaatgcggcgctgtttctcaatgatctcacggcacaagccatggtcaacggtattcttgaagccggttatctgaatcaagggcaaatttgtgctgccgcagagcgtttttatctgccccaggaaaaactggatacggtcatgacgctcctcagacaacggttatcggagatcgtgcccggctcgcctttagatgaaaaaacggtgatgggcccgctggcgaatcaggttcagcttgaaaaagtgctgcgtctgattcaacgtgcacgggaagaaggggataccattgtttatggcggtgaaactttacccggcgaagggtactttttacagccgacagcggtaaaagtgcgtagtaaaaacagtacgctgatgcacgaggagacctttggccctgtctgtagctttatcggttatcagaatgaaaaagaggcgctttcgcatatcaacgattcgccattcggccttgctgcaagtgtgtggtcggaaaatatatctaaggcattacgctacgctgaagatattgatgctggcatggtgtgggtcaatatgcataccttcctcgatcccgcggtaccctttggagggatgaaaggatcgggcataggtcgtgaatttggcagcgcgtttattgatgactataccgaacttaaatctgtcatggtccgttattaaccatcctgaaaatgatgcaggcagatcaaccataccgaaaggtggactgtctgcctgattatcaggttcgctcgctgcgtttttttgcttttgggataatgttaaacgcccggcccggcgttccttcctgcattactagcgccatctaccgttagagtaggctatctccagccttaacggttcagactcatcctgtaacatcgcttccaaagacaacgccagcgtctgatgatgggcatcttttacactgactttcagcatattgatgctcggttcataacgtaaaatagcagcgcgaagctcacggcaaaaccagttgagaacccgtttgtcacccacattcacctcgtgccattccggcataccccgagtgagcagcggcggtaatgtctcgccacctggcacggcgcaagagttgaataaacacattaacttgcgtcgtaccaattcatgtgggcttatcccctcaaccaagagcctgtcgaatagcgcgaccggaatggttggtgtcatcatcatttccctatctggttcatcgccagatcccatactgacgttctggactcctgctgagcgccgtctgatttctcggcagtgatttgccattcgattttcgtgaagttcagcgacatcgtttccaccggcttaccgccggcgccgccgctaacactgagttgtgatatcagcacgtttgtcagggtataaacgataagcgaccgcattttgccgtcgtcattgcggcacaacgtcagcaccgcggttctaattagcctcccgctacagcagtactcattgagcacaggcgtggcgaggtcgacaaatttggtgagcgacatttcaccaacatgcgcgcgcccggaagtccgctcagtgaggctaacatcgttatttacctgcattgccacattgtggctataagacatgatctctatctgatcttcaaagccttcaacctggctttcgcctttgatattgtcgagctttaaaaaaatcgcatccatgatttatctccttgttgatcaggtggcagttcagcagccagacgaataccggcggccagcgcttgtgactcttattaaaagcgcaacgaccaaaaaacacagcgtgaaaagcgccaggtttgcagggattttgccgacgtttacccacgtctgatgaacgttattccgctggttgcaaagcaatagagggttttggcccgctgtggccaaatacaattgaggttatactgaacgctctctgccatattcaatcccttttatcgcaaagtatccctggtgccggtatcacagcgtcgttattcaaaaattgacatttcagaataataatcagctatatataaaaaacacatcaaaaagcaaatatcaacttaatttttacttatttaataaaaaaatccaaattgatttacatcaattaacacacacaaaaacattaaaaatcaaagggttaaatgaaaattaatcactatggaaattttatttttcttaatactcacattataaatgttatttgcttattatcctgtgaaaactaaaaaatgatttaaatcaaaaaacaaactattctcgttgattaacgttttgaccgaaataaaaaagattttatacgtcccgggatagtctccctttctgatggacaatatgcattaacgagcgggcaaacaggtaacttctgcccgggtaatccgttacccgactgatattaacattgtcatgaggtgatatcatttgcccggccagccataatcatccggaaccggcgctacgccacgaacatcaggacggagcattttttgtcgatcctcttcgtcatccacccagacactggctatctcttcacaggttgcaaaccatacgccatcatgccctttaatatgttcaatcaaacgtaacaacatcatcatatgatgcccatgaccgattatctgcggatgaagagccatcgcatataaactgttttcctgatggtgataagcataggtaaaaatatccttccagcgtcgcagaacaccgtcagtatcgctcatcccctcctggttgccggtatacgccagtgcgggaaaatcatccagataccagctaacaggaatttccagaatcgcgctggccgggcctgcgatatttcccgtctcccaattcacctgccaacgttgaggatggtaaggcacaagatctctcgccatcaggctactgtcatagagaaaaccggcttcctccagaagatccagcgtattctcgctataatcccaatagggagaacggtatcccacagggcgtatgccgaaatgtcttttataacaggcgaacgccagatccataagtcggcgttctgtatcacgattcaccagcgtcggattttcatgatagtagccatggtgagcgatttcatgcccggcatcaaaaattgctttaatgatttccgggaaggtgtctacagtgtgtccgggaataaaaaaggtggttttgatattattttctttgaacaatttcagaagccttggtacgccaacttgagcaccaaactctcctcgtgacataaaggatggcgacggtcgattaaatccgcccagccataaagactgagcatctacatcaacaccaagattgaccgcaatccttttaccctcaggtaattttaaatatcccataacgacctccagctaatacatagaagggacacattctgttatttaatgtgtgatggccagatattatatatgcctgcttttctgcgtctgtccttgaacgttgttgctgcccccccaagtctattttcatatagaacatcgaggttaatttctcctgaaatgacatcctcttgattgacgtgcgcctctgcgataataccttgtggatttttccacacgacatcacaggggcttaaaattgaacttcgggcccagcagcctggcagtggcccgcccgggtttcctcccaggcaacagtgaacaagataaatttgattttcaatacaacgtgcgtggcaacaatgcctgactcgccaaaatccctgttcagtaaacgtagcggaaggcgttaaaattaactccacaccctgttccgccagcgtcgcggcacactccggtatttctgcttcataacaaatattaaaacccacctttgcaaatggcagttgaaaaacagccattttatcgccttcctgagtataccaaccccgttcagccgggaagatatgcgtcttactgtgagcataatgttcgccatcgggtccccatatatgcgcaacattctcatagcgatctgctccagtctgctccagatgagagccagcaataatgaactgtcctctttctttcgcttcctgttgaaaaagctgcttataggcatccgtgaactgatcaattaaagtaaggtgtgaaatgggtctttcttgccattttcaatagtgtaaatagctcaatggtaaatagctccgggaagataacgacatcagctccctgacttttattaagaagtatccttacctttgttatgaaatcttcaaaagtgtttatttcggtaacaatatactgacaggctgaaacagtaaaattacgtggcatcgtgatatccccggcatgaaatttaaacttaaattaacgtatagcgcatggagaatattagggagtggacattacgacatcaggttattttttgtgaagctgcgcaaaatatatggagaaaagagtagaagcattgaacctttatttacataaaggggactttatcgatgatcgcagcgagacagagagtcgataaaaatccaggcgaaaaacaataacccttaccacaatattattttcagcatctgaaaataatcaggcaaactaaatgataacgcgctggtataaaaccaacgcgtatttttaccgataagggtaatgaagacggccacccgaaggtggccgttagaacccggtagcgcttcgcttatcaggcctgtgaaaccgagacagctttagcggtgagacgccagcggctgttccgtcattggcgggtggtgcttttccggatctttaatcagtacccacaggatgatggcgccgataatatcgaacagactgagtgcaatgaagaacgggccgtaaccgataatagcgaccaatgcccccataaacaggttgaagcttaactgtcccatccatgccgcagatcctgccagaccggcaaccgtcgcgacctcatttttcttgaacaggtcagcgctcatggtaatcacgacggtagacagcgtctggtgcgcaaaaccgccaatactcatcaatgcaatggcgacatacgggttagtcgtaatgctgacaaaaccgatcgaaatcatcaaaacagcgccgatggtaaagctacaacgacgcgcattgatcgtggtcatgtgcatcttttccatgaagaacttcgccaggaaaccgcctgcaacgcagccgaagtccgccgccaggaacggcagccaggcaaacatggcgatctcttttaacggcagatgcatcacgttaatcagatacagcggcatccagaaactcagcgttccccatgccgggtcagcaagaaaacgggtaatcgccaatgcccagaagttacgctttttaacgatctctttaacggccggttttttattatcgtcctggagatagctttcctggccgtcttcgatataacgcagctctttgtgggtgatccacgggtgtttatttggcgagttataaatcaggaaccaggtgatggcgaacagcacgccgatcccaccggtaatcacaaacgccatttcagtaccgatgccgctatcagcaaaggtcagcatcgcccagaccaccagcggcggcgccagcatcgcgccaattgaagtaccgatattaaacaggccccccgcaataccgcgttctttcgtcgggaaccattcggcgctggctttaatcccggccggaatcgctgacgcttcggttagccccatcagaccacgcagaaatgccagacttatccagccgccggccagcgcgtgcgccatgttgatcagcgaccacaacaaggcaaagataaagaagccgattttcagtccgatgacatccatcaaatagccggtgatcggctgcgcaatggtgtaacaaagctggaaggcgctcaccacccaggaatattgttgctcatcaaaatggagttctttcatcatcgctggcgccgcaacgctaagcgagctacgggacaggtagtttacgatggtccctacgcagaccaggccgataatccaccatcttaattttgtcatcttcatgataaagcctcgttaaaaaacattagctccgcgccgtctgacctgtagcgggaaaactgaaatcacaaaaattggttgaccaatcaatattttctcatccggaccggtcaaaatctggcggcaactcccgcctttaatattcttgaaataaatacatcaactcatttcaagttgaatggtgaatgctttccacccagcaaaaattgacacagatcaaataaataaaattggcagaccgtgaatgatgatatttgtgatttggttagccaatttagacaataaggttgacatgagaaaaattttggttgaatttagggggcagaacgggtttacaaagcacgtttcgaagttggctggcaatgggtcaaccacgaagacgttatcgcaagaagaggaaacgagatatgaaacaaacctggcgctggtacggacctaacgacccggtaacgctgtcagatgtacgccaggctggcgcaaccggcgtggtaacggcgttacaccatatcccgaatggagaaatttggtcggtagacgagatccagaaacgtaaagctatcgttgaagaggcgggtctggagtggtctgtggtagagagcgtacctatccacgaagatatcaaaacccacaccggtcagtacgatttatggatcaaaaactaccagcaaacgctgcgtaacctggcgcaatgcggtatctatacggtttgctataactttatgccggtactggactggacacgtacggatctggaatacgtattaccggatggttccaaagcgttgcgttttgaccagattgaattcgccgcgttcgaactgcatatcctgaagcgtccgggagcagaagccgactatacggcagaagagattgctcaggcagagcggcgtttcgccaccatgagcgaggaagacaaagcacgtctgacccgcaacattattgccggtttacctggcgcggaagaaggctatacgctggatcagttccgtcaacacctggcgacgtataaagatatcgataaagcaaaactgcgtgaacattttgcctatttcctgaaagccattattccggttgccgacgaggttggcgtgcgtatggccgttcaccctgacgatccgccgcgccctattctcggcctgccgcgcattgtctctaccattgaagacatgcaatggatggtggaaaccgttaatagcatggcgaacggcttcaccatgtgtaccggatcttacggcgtgcgcgccgacaacgatctggttgatatgatcaaacagtttggtccgcgcatctactttacgcatctgcgctctacgctgcgcgaagagaatccgaagaccttccacgaggccgcccatttgcacggcgatgtggatatgtatgaagtcgttaaagcgattgtggaagaagagcaccgtcgtaaagccgaaggtagcgacgatctgatcccaatgcgcccggaccacggtcatcagatgctggacgatctgaagaagaaaacgaatccgggttattccgccattggccgtctgaaagggcttgcggaagtccgcggcgtcgaactggctatccagcgcgctttctttagcaaataaccttctttcgcatggcgcgacgcgtcatgcgatttcccctactcaatgcaatagcaacatgcctcgccccggagatcgcgggcgaagacgtcgaatgacaggagtttgcaatggaacagaatatcgccaccgcccaggtttccgtcgcccgcccaaactgggacaaatcacgtctggtatcccgtattgtgcatctgggctgcggggcgtttcaccgcgcgcaccaggcgctctttacccatcatctactggaaaagagcgacagcgactggggcatttgtgaagtgaacctgatgccgggtaacgacgcgcggctgatcgcgaacctgaaagcgcaaaatctgctgtacaccgttgcagaacgcggcgcagaaagcaccgaactgaaaattatcggttcaatgaaagaagcgctacaccctgaattcgacggtcatgcagggattctggcggcaatggcgcgcccggaaaccgccatcgtctccttaaccgtgaccgaaaaaggctactgcaccgaccccgccagcggcgagcttgatgtcaataacccgctgatccaaaacgatcttgcccatccacagcagcctaaatccgccattggctatattgtcgaagcgctaaacatgcgccgggagcaaggactgaaagcttttaccgtgctgtcgtgcgataacgtgcgcgagaatggtcacgtcgcgaaggctgctgtcctcggcctggcgaaagctcgcgatgccgccctcgccgcatggattgccgacaatgtgaccttcccctgcaccatggttgaccgcattgttccggcagcgaccgaagagacgctacaactggttgccgaccagttaggcgtttatgatccctgcgctatcgcctgcgaacccttccgccagtgggtcatcgaagataactttgtgaatggtcgcccggactgggataccgtcggcgcgcaattcgttgcagatgtcgtaccgtttgagatgatgaagctgcgtatgcttaacggcagtcactctttcctcgcctatctgggttatctcggcgggtatgacactatcgccgatactatgactaacccggcttaccgtcgcgcggcgctggcgctgatgcttgatgaacaagcgccgacgttgtcaatgccggaaggcaccgatctggaagggtatgcgaatttgttgattgcgcgtttcactaacccctcgttgaaacaccgcacctggcagatcgcgatggatggcagtcagaaactgccgcagcgtttgttggacccggtacgtctgcacttgcaacagggcgatgactatcgccgcctgacgctgggcgtcgccggatggatgcgttatgtcggcggtgtcgatgagcaaggtaaaaccattgatgtcgtcgatccgctgcttgcacagtatcaggcgattcatcagcaatatcagacgccggaagaacgcgttcgcgggctactggccatcgagtctatctttggcaacgacctgccgaagaaccacgaatttgtgcaagccgttaccgacgcttaccaacagctattgcagaatggcgcgaaagccacggtagaagcgctggctaagtaaggagataaatcatggctacgtttatgactgaagattttctactgaaaaacgacattgcccgcacgctgtaccataaatacgccgcgcccatgccgatttatgacttccactgccatttaagtccgcaggaaatcgccgacgatcgccgtttcgataacctcggtcagatctggctggaaggcgaccactataaatggcgagcgctacgaagcgcaggcgtggatgagtcgctgatcaccggcaaagagaccagcgattatgaaaaatatatggcctgggccaataccgtaccaaaaacgctgggtaatccgctgtatcactggacgcaccttgaactacgccgtccatttggcattacaggtacgctgttcggaccggataccgcagaaagtatctggacgcagtgtaatgagaaactggcgacgccggccttttccgcgcgcggtattatgcagcagatgaatgtgcggatggtcggaaccaccgacgacccgatagattctctggaatatcaccgccagatagccgccgacgacagcattgatattgaagtcgcgccaagctggcgccccgacaaagttttcaaaatcgaactggacggctttgtcgattacctgaggaaactggaagcggcggcagatgtcagcattacccgtttcgacgatttacgtcaggcgctcactcgccgcctcgaccatttcgccgcctgcggctgccgcgcgtcggatcatggcattgaaacgctgcgatttgcgccggtgcccgacgacgcgcagcttgacgccattctgggcaaacgtctggctggcgaaacgctgagcgaacttgagatcgcccagtttaccacggcggtgctggtctggctgggccgccagtacgccgcgcgcggctgggtgatgcagctacatattggcgcgatccgtaacaataatacccgaatgttccgcctgctggggccggataccggctttgactccattggcgataataacattagctgggcgctctcccgtttgctcgacagtatggatgtgaccaatgaactgcccaagactatcctctattgcctgaacccacgtgataacgaagtcctggcgaccatgatcggtaacttccaggggccgggaattgccggaaaagtgcagtttggttccggctggtggtttaacgatcagaaagacggtatgctgcgccaactggagcaactgtcgcaaatgggactgttaagtcagtttgtcgggatgctgaccgactcccgcagtttcctttcttatacgcgacatgaatatttccgtcgtattctctgtaacctgctgggacagtgggcgcaggacggagagattcctgatgatgaagcgatgctaagccgtatggttcaggatatctgcttcaataatgcccaacgttatttcacgattaaataatcgctattaatctgtgagcacaggtttcaggtattttgagaggcaggaaggcggtaagagagtgagaaatttagcagtaacgcacttttccagccaaagtctggccgccgataaaaagcaaagaggttactgattaatcccgaatcacttactaaggtaagtgattcgggtaaacaaacacagccatcttctgcgtcatgctttttttctctgtccggaataactccagtgcagaaagagtgatacatcagtcctgttgatgatggatcctgtgggttatacggtaataacttatgacttcacagtgtggtttcttttaacaaatcgacagccagcatttccagctggttaaccacctcattactggatcgctccattctgtcgagttcttgcgacatcgcattcatatcgcctgcggcaaaatagttcagcgcagagtgaccagcggtatgcacctctttatgcggcgcttccagactacggaaactgtagtaattgctaaactgctgcccttcaaaaccgtagtaccatttccccagccgacactgatcgtgcatcgttattttactgtttatgtctttatttaagagtaatttgtagacttccattttccagataacatggtcaactttgacaatattcaaaaactgcaccgtagagatgtactgcatgaccgatttcatgctcagcgatttatcgatgacgatgccaatagactccacaatttgatttatgttagtcgtaatattatcaataaccggctgttggttatccagcacctcactcactctggccgtattatctttgattacagaggttaacgtactgacgcttttcgaactgtgtttaacatcttcggacaggtttttcacctctttcgaaataacgctaaaaccacgcccggcatcccctacgcgcgcggcctcgatcgcggagttaatcgctatcaaattggtctggttagcgatcttctgtatctctttaatacacgcattaatttgcgttaaggaggtatttaagtcgcccatacgacagccaatatccgatgaagtcgtgccaatttcggtgataaattccacgagcgattttaatgaacttctggctttatcattctgttcattaagttcattaatgcgttctttttcaatgttgagctgctcacaggatttaatgatggcattacgaatgatatcgatcgtcgagatccccatcagaattttttgacacagtatccgctcataaggctcaggagtatccaccaccacgtcagacgcattagcgccagattctgctgctggcggcggtattttgacaacattattattccagtggcgcaagcctaatacttttttaaacatataccattctccttattatatgtggacatcctgatctatgcctggataaagtattatcaactcatgctaacataatgaaaaatcggctgtcatctgccataaccatacgctcaccagaataagacaaaacgtccaccaaacttaaataattacaaggtaaactattcaacaataccattaatagtcatgatggaagtcgcttcgctttatacggaaatattatttacaaggctgacaataatagctgaataataattaactgcatttacttaggtgtatctatatctcggcccgaagattgcaaacagggtttaaacgcaaacttttgcaatagaaaaataacctaacgtaaactttttatatgaccaataatatcatttggactcatcaatatattatgctgtccgtttaccagccaaacaggcatgacctaaatccaaaggaatgggggcagcgtaaccagccgcaaaaagtatcgattagtcgaaaatcaggaaacggatgcgccaacgaggcgagcgtcaccgcctgcgtcagaaaagttaagaataatttgtgatattatttctcatatgttaccagtaaatggcaggctgatagcccttcgctggtaaacacaacaggcgggatatcggcacccacgccgatatcccgacgagaatgaccccgttacgctttgatgacgattaacggttcaatatcgctctcttttttaatgactaatgaatcatcgccgcgcaggcacgtaccgccgtagttaccgcccacggtaaacgtacagacctgaatatacttcccggcgaccttcggcaggcaccacaactgctgatagatatttttctgcgtggcgaacttgccgctggttttatccagtagctcttcctgatggctcaccaaatcgatattactaccgcaacgtccggctatcggttttaccgcatagccggtctgcaccagctcatcgttaacggtaaaatccgtgtcgagcaaatagcgatgatgcgggaacagcgaccacaggataggcaggatcgctttgttgcccgggatcaccgtccacagcggttcaaacaccaacacttccgggcgcagtaatacatcaatcagccggacttcattttccgggtgcccggtacgaataggcactgcggcatactccgtctcgctgacttcgcgtatctgctccatcgccgtttcccacgcccaggttttccagacacaattcaccagccgtccgtcgccatcgatcaactgcccggcgtcatcccagcgcaactcgcccagcccgcggaggattttgctcgcgaagccggcctgatgcagcgcctgctgcataaactgcgcgtgatagtcctcctcgatatcatcatcctgcatgatatggacgaaaggacgcgctttactgtgtttccaggcgcctgccagctcgttaattaagccctctgccgggttatgccctttaccggtatagccctgctcagcccatttttcgagaattaatcccgcttcggtatggcatgatgcggaatcggcattgtattcatagactttcagcccgcgttcatccatgcagaaatccatacgaccggtgatcatatggtgacgacggcgctgccaggagaggcgcagacgcggccaaagaattttggggatatcgaatagcgccagcagattatcgtcttttaaaactttgtccgtggcgtgcaggtacatcaaatgcaactcattggtcgctttgataagctcctgttcagcgctctcggtgatggtaaaatactggtacgggtcctgattgataacgtgcccgttcgcctgtacataggctttttgtaacggatcgcgctcatccagccactgaccgtcaaactgacctttctctggcagtcttgcgccgcgaatcgccagcgactgattcgcgatgtcaggctgtgacaaactgtattgcgtgtcttcggtctggatcatccagcctaaaatcgtcgtgtcatcaaaggtgtcgcgcagggtgtaacacccgttttctacgaccatttccagttcgcgagtccactgctgccctggcggcaatggcgtgtggataacgttttgctcagcaatacgaattttgttatccaggagttgggtgataatcgcgacgtgcccggtttcgttaaactcgccgcccttttgccagatgagcagcgccccggcctccggcgcgcgcggcgaaccgttcgggaaggcctgcaaaggcaaaatattgtcattcacgacctcgcgcagaaaacgtagcgagaagatttcccaggccatgccgacgtcagtaaaaacaacgccataattcagaaagagaaaacggcgggcaaattccacgcactgccatttatgccccatgtattcatcgtcgatgtagctacgaaaagctgcgtcgtcgtcgtcccacggatcgagggaattgtaatctgaagagtagatcgctacgccgccgggggcgtaacccaataatgtcccgaagggggcatcctgactggtggttcctttgctcatgcacttacctcaaaacaagaccgcctgagcagcctggcgtgatttcgctctgattgtctgctctgtgacactaaccggacagaggtcgacataatcatacacctcaataaggcacactgaggccagaaggttaaaatttcactcgccggaatgtcccaatcggttaaatgtccggttagcaagctgctacactgcttcaacaccaccactgtgaaggcaggtcaatatggcagataatacttatcaacccgcaaaagtctggacgtgggataaatccggcggcggcgcgttcgctaacattaatcgcccggtttccggcccgacgcacgacaaaacgctgcccgtcggcaaacatccgttacagctttattcgctggggacgcctaacggccagaaagtgactattatgctggaagagctcctggcgctgggcgtgaccggcgccgaatatgacgcctggttgattcgcatcggcgagggcgatcagttctccagcggctttgttgacatcaatccgaactcaaaaatcccggcgctgcgcgataactcacacaacccgccgattcgagtttttgagtcgggcgcaattcttgtttatctggcggataagtttggccatttcctgccgcaggatctggctaagcgcacagaaacccttaactggttgttctggctacagggcgcggcgccgttcctcggtggcggtttcggtcatttctatcattatgcgccggtaaaaattgagtacgccattaatcgcttcaccatggaagccaagcgtctgctggacgtgctggataagcagttagctcaccacccgtatgtcgcgggagaagagtacactattgccgatatggccatctggccgtggttcggcaacgtggtgctggggaatgtctatgatgcagcggagtttctggatgccggaagttatcaaaacgtacaacgctgggcgaaacaggtagccgaacgtccggcggtaaagcgggggcgcattgtcaaccggaccaacggcccattgaacgaacagcttcacgaacgccatgacgccagcgacttcgaaaaccataccgaagataaacgtcaaagttaaaccataatgccggatggggtagtaatgtcgtcatccggcatggtattccctgctgacgcttcgcttatcagttctgcgagtgcgtcatattcggcgcttcactaaacccatgttgcatgagaatcaacctcgcccgtgctgacagtaaaaagtcggcaagcgtttttccctgctcgctcaggcaggcaaagccatattcagccacgggattataaggttccgggatatcaaccactcgcagcgaattaacctgccgtagccagggagcatagctggcatagccgataaagatatcggtgtaatcatgattgatgagccattccgctgccagccggcccgccggtaacggcaaagtctgcctgccgccaaccagcgctaccgcgcgttttcggaccgcttcgccctccttgcccatccgcgaaaaaagctgctgcgtataatcgccggaaggatcgcaacctgctgttgaggtgccgatccgcagatcccgccgggttaatagcgacaaccagtcctcgccttcacgcatcgcctgtgcccgcacgctcaggcacaaacggttcgtcgtaaaaggcgcgacccgcagcgcccgcccgctttccagcagcgcctgcggatgcgccaggttcgccgaagcaaaaaagtcgcacgcttcgcccgcttcgatgcgttcacgtaacagccccgccggaccgaaatcacataccgcatccgcctgaaacgccgccattagctgcggccagacgacgcgcaagctccccgcagccagtattcgcattattgtacgccctgatagtcagtacggtaaaaacgttgataccagtcgttagcggccttttgcatgtcaatatcgtggaatttttccggatagagttttttcgccatccacagttcgccgattcccaccgcctccggcatcggatatccccaggctttggcataatccggcatcaggtaaacccgatgatgcttcaccgcgtcaatgacctgccactggggattgtgcaggatctcattgacgacctttggatagcgattctggacaaagatcacctgtggatcccaggcgatcacctgctccattgtcacctgcttaaagcctttcaccgaggatgccgctacattcagcgcccccgcatgggccatcatcagaccggtgtatttaccggaaccgtaggtggtcagctccggattcgccatataggcgcgaactcgctcattttcagggaccgactgcaaacggtcgctgaccatcttgcgacctttatccatcgcctcaatcagcgctttcgcctcttgcggtttattgacgatatcgccaatcagcgttattccttcacgcagcccgcgattataagcctgctcttcatcggccagggtcgggttcattttagcctgctcgccagcaatatcatggcgcagcgaaatcgccactaccggaatgccaagacggctgatcttgtcgatcatctcctgcggagcgtaattcgtgacaaacaccacctgcgggcgcagcgccaccagtttttcaggatcaacgtgcgttagatcgcccagcgaggctttttgcgccagttccggcgccagacgcgcatagccgtcgcctaattgctgtttccagttcgccatgaccccaacgattttgtcagtggcattcatctgtacaaggagattgagcgtttgatgctggagcaccaccactctgtcgacggtgtccggaaccgtgacctggcggccaatttgatcggtaaaagtacgcgccgcctgtgacattaacggccagcaaaaaagcaacgccagcagagagagctggcgcaaaaatttattcataggtttcgccccataatcgatatataaataattatataacgattatagagcgatataatagaggtgattaagggatcacgcgctggtgatgtcgtactccatgcggcgcagcgcatctaacgtggctttcgcttcgtcttcgtcaatgatgctcatggcaaaaccaacgtgtaccaatacccattgccctatcagatcggctggcttaccttcacaaatcagagcaatattgacatcacgtttgatgccacacacttccacctgcgcaagctggtgaatatcatctccgacggccagcacctgaccggggacgccaatacacataattaaccacctgaaataaaatgcgggttattcgacctcaatactttttactttcaacgaatcgccggtatccacccgcaggcgatcgccatgacaatgcggacattgcgcgtcatgcctgagaatttccaccacctgactgcaatcccagcaccaggcctgggccggtctgtagtcgatgtgcaattcgcacccttgcgctaaagtcccctggcaggcgatatcaaaactgaaacgaaccgcgcgctcttcaacgcacgaaagcgcgcctatctccagccatacgccggtgacgcgcgccacgccgtgctgttctgcctgctgctgaataatttcaacggcgctttggcaaagagacagctcatgcattctcacagctccgacggccaaacagcaacgcacgccggcttgtctgcggcgcatcaggattgcttaccggcagagataacagcatccgcgcgcagtcatccgccagccggacgccctcttccggcgacaggctacgggaaagcggcgacatcaacgagcaggcaagatattgcgaaacgccttccagttcgccaacggtaaaggtcatcgtgccataaggcagttgcagaccgagtttttcaccgacggtacgcctgggccagatctggtccgggccagggaagattaatgcgcttaacatccacggcgtaattaccgtgcccgtccattgtccttcaaataacgtaaaatcagagacatgcactggcatagtcggatgcagaaacgaaagatcgtgcatcgaacgatgggctatctcttcaaacgccgcctgaacccgggcgacgggcgccgtgtcgaatccggaaaacgtttcagacatgcgccgtctccttaggaattgcttcgacgccggattcacgcagcgcagcaagaacctgctcaagcgcaggctcaatcatcgcctcgacggttggcgttaagccgatgtgcggttccagcgactgtggaataacgccaaccagggtcagtttcttcggaaactcgccggtaaagcggagggccgacaatacgtcggccagtccaagctgatggggggagattttgttggtgaacagcgccggaacttcatcgtcgcgcagtaccataatggttcccggcgcgttctttttcgacacgatggcgtcggcaatgatcaaatgatcacgattcgccatatcgccaagaagttccattcccgccgtaccgccatccagaatctcaacgaaatccggcagggtgtatcgttgctctaacgcttcaacaatacgcaccccgatggcttcatcggtcagcaaaatattgccgacccctaagactaatatccgcattacaaaaccttcaccgagaccacttcattgccatcggcgtccaccacgtgtaccgcgcacgccatgcaagggtcgaaggagtggatggtacgtaccacttccagcggcttcgccggatcggcgatcggcgtaccgaccagcgactgttcgtacggccccacgtcatcgttgaagttacgcggacctgagttccaggtcgatggcaccactgcctgatagttactgataataccgtctttaatcaccatccagtgagacagcataccgcgcggcgcctccaggaagcccacgcctttgaactcgcccgtcgccggaatgttcggcttcacaaacgtggtgtaatcgcctttgccgatatttacaatcagcgcgttgtattgatcctgcaatatgttttgcagttcacaacagtgaacggtacgcccgatgatacgacccagcgtagagtgaagttgcgccatttccagcgttttgccggtcagcttctgataaagcgcaatgatttcattgagcttggtctgcgtggattcacgacctgcagccagtttacacagcatgttcgccagcggcccgacttcgacggttttgccgtagaatgtcggcgacttgacccatgagtatttaccgtcatccgaccaaccgtcgtaagccgggatcgtagtgccttcccacggcgcctgcggcgcttcatctttgtaccaggcgtgcttcgcgctctcctgaatacctttaatcaggaactcgtcggagtgagaggtgatcggacggtatgtcgacagatcggcattggtaatgtaaccgcccgggaacaggaaactgccgtttttaccgtcggtcgggaattccggcgcgctcaggtagttcaccgcgcctttgccacgctccagccattccggatagtaggccgcgatgactgcggtatccactttatacacctgctcgacaaaatcgctcagcttatcaataaacgatttgatgtacatcaggcgttcaaggttcaacgtaccgatgctgtcgagattgatcgggttcgccaccccaccgaccgccaggttctggatatgcggcgatttaccgcccagcaacgccaccacgcggttagcgtcacgctgacattccagcgcctgcagatagtgagcgaccgcaatcaggttgacctccggcggtaactgcattgccgggtgcccccagtagccgttggcgaaaatacctaactgaccgctggcgacaagatccttgatcttgttctgaactttcgtgaactcttgcgcgctgttcaggtgccagctcgacacaccatccagcatcgcggaggctttttccggatcggctttcagcgcagaggtaatgtccacccagtccagcgcagagagctggtagaaatggacaatgtggtcatgggtggtatgcgccgccagaataatattacggatatactgcgcgttgacgggaacatcaatattcagcgcgctttccgccgcacgaacggaggagatcgcgtgagttgtcgtacaaacgccgcaaatacgctgcacaatcatccacgcatcgcgcggatcgcggttcttcacgatctcttccataccgcgccacatggtgccggacgcccatgctttggatacgacgccgttctcaatttcgcagtcaatgcgtaaatgaccctcaatacgggttaccggatcaatagtaattctctggctcatgctttgctcgcctcatgacgattatgatcgttttgttttaaaggaggaagtatcggcagtagacgaatgagtacgatgtatgcacaaatctcaatggccacaaaaccaatagaaatcaacaattcttcccaggttgggaagtagtggtagccgccacccgggttgaatgccaccagcgaataggtcagacgccacgtcgcgcagcccaacagcgcgctcagcgccgacaggtacagcatacgagagtcattacgcagtttcgccacacgcagcaccactaacgggaagaccatcaggacgacttcaatccagaacatagcggagtaaaaatcgccggcaaacgcataggacagcttgtcgcgataaatcagttcgccaaagcgcaggacgacgaaaatcgccagcagcacgctgatggtattcgtcagcttaacaaacaaatttttctcatccggaccgtttcctttcaggcctgcctgaaccagcgaaccctcaaatatgacaatggagaagcccatgataaacgcggtcagaaccgagaacagcggcagcatttcatagctttgccatagcggatgcactttatagcccgccgagatcatcaatgaccccattgaggactggtgcatcgtcggcagcagcgcgcccagcgcgataataaagaacatcaccttattcagacgcttgagcgacactttccagcccagacgttcaaacagggcaggcgcaaactccagcgccatcacgccgatgtagatggtcatacagaccgccgtctcaaacagtaccgagttcacgttgaagtgacctggaatgtagaagtacggcaggttccagtaacgaccgacgtcgatagtgatcgacaggccgcccagcgagtaaccaaacaagcttgccagcaacgccgggcgcaccaacggatggtattgcccacggttaaagacatacaccgcccatgccaacgcccaaccgccgcaggcaaagccggtgccgatcaacaggtcaaaggcaatccagacgccccacgggaaaccgccgttcaggtcggaaacggagcccaacccgaagaccagacgcttcacgataaggagcatacacaggacgattaacggtccaaaaataatgaccggtttactgatgatttttccgcccagcggttttggatcatgactcatgatcgtctcctccatcgtgatggtcgtttttgctattacgacgaaccagcacggttaagcccgccagcgcagccaggggtagtatcatgcctttataaagcgtgtgttgaacatgctcggagcgcgctccggttgaaaggtcatccagcttcggcagatccagatcttcataaggaacgcctgtcagcaccagcacctgagtaccaccgccctctttttcaccgtagaggtgtgggtagtatttaggcaccgtatgcagataggtgtcgtccgttttcaacgtctggcgcggatagtgatattcactgcctggtttgagggccagacgttttttcgcttccgccatcagctcttcacgagtaccgaaaatgacggcccctgccggacaaacttccacacacccaggcaaaccgcctttatccagacgctcaacgcctttctggttacacaactcacacttgtgaagcgcgccaaacgggttgttgtagtcgtacttaggtacgttgtacgggcaggcaaccatacagtaacggcagccggtgcagacatctttgtcatagtggacgatgccggttttcggatcttttttcagcgccgacaccgggcaaacggaaacgcagttaggatcgacgcagtgcatacactgtttcttgatgtaggcatagccgttctcttcctgatctttgttcacgcccgtaccgctacgccatacctgaataatgttattggtatacggcgacagcttgtcgttgttcgaccaggtctgctccccttccgggttacgcgccgggaagttgatatcctgacactttgtgacgcaggcctgacagcccacgcacagagtggagtcatacagcatacccagcgaacctggaatcggcggacggttttctgcagccgcatggctgacagacggcgcggcgcccaacagcaatgctccaccggaggctgctttaataaagtcacgtctgttcacggttattctccccgtgagtcagcgttatctttcttttgctgacgccccagttcacgtaccgccatcacgctgacgccggcaaccagaccgactacgccgccaagcagaccgacagcgcccgcagagatattgccgccttctttcatattgacgtcaggtttctctgaacgcggagtttggttttcgacatgagcaagctggtgaatgcccttatggaagccgataccttcttcgttacagccatagcaaggatgaccgatcgccactggccagacgccgccaacgtcacagaactgtaacgtagaacagttgccccaggtttccggccctttacagccaagatggtagagacaccagccctgacggtggccttcgtcgccaaattctttggcaaaacggcctgcgtcgaagtgtggacgacgttcgcaatgctcatgaatcagacggccataggcaaaggttggacgatttttcgcatccagcttcggcggcgtgccgtaagtgatgatatgcgcgacggtcgccaggaagttatgcgggtttggcggacaacctggaatattgataaccgttttgcccggtaagacttcctgcagactgacagcgccggttgggtttacgccagccgcagcaacgccgccccatgccgagcaggaaccgatagcgataatcgcggctgcgccatcagcggctttgcggatgtgatccacgatcggctcgccggcaaccatgcagtagataccgttatcttttagtgggatagaaccatccaccaccagaacatattgccctttatacttctccagagcgttatgtttgttttcttcgacctggtgaccgaatgcggcggaaagcacctcgtggtattccagagagatggtctccagaacgaggttttcaacggttgggtgtgtagcacgaagcagtgattcggtacaaccggtacactcctgagcgccaatccagataacgggcggacgctgtggattggataccgattctgccatttctgcggcggctttgctactgagccccatagtagcggccagtgctgcacaaagcttcatgaaatcacgacggttaatgccgtgagaagtgatgagagtattatctccagtcattttatagttattccgttacgaagacctggcttttattttgcactgttcgcgaagaagttattgcgatcggtacgccatttaccacactttttttatggttatgtgcgccataatacttcgacggaacagtaaaacgaagggaagaggcgatagtgtaattaattaaagcaagataatacccctgttggatcaaccttcgagtcgataaccggccataaagaagcgaaccgccatcccggaatgattctctttaaagaaatccatcaccatttctttatccagaccatagcgacgcgtcagaattccagcctcccacgcgctaagttgacgatcgccggtcttttcgaacatacggtgtgtaaaacccaatacaaagccacgtttatactcagaacagaaattcaccgcatgatgcgcgctatatgcatatggcgcgtgcaacccggccattaaccctttcccaaaatgattattcatctgacctccttagtcgctatataataaattatatagcgactaattaaatgaaggccagcgcattacgcgcttttttgcttcacatcagaaggaaacccattcatcagtagactgtgcgggagccgacgccattctctgaacgccaggcgccgctttcgccgttacgcgttgttgcggctcactagcggaaagccggaactgctgtacggagcgttgcaaatcctccgtctgccgttccagcgccgccgccgccgcggaaacctgctcaaccagcgcggcgttttgttgcgtaacgctatccatttgcgtgatcgccacgccaacctgagaaatacctttactctgttcttcggaggcggacgcgatctgtttcataatcgtcgtcacttccgtgacgccgcgcaggatggcgtccatcgtcgcgccggtctcctggaccaactgcgcgccctgcgctacgcgacgtaccgattcgccaattaaggcttcaatttctttcgccgcccccgcgctgcggctggccaggttacgtacctcaccggcgaccaccgcgaagccgcgtccctgctcgcccgctctggccgcttctaccgctgcgttcaaggccagaatattggtctggaaagcaatactattaatcacggtagtaatttcggcgatctgctgcgaactggcggaaataccgttcattgtttctaccacatcggaaaccagttcaccgccttttcctgccgttagcgaggcggcatccgcaagctgactcgcctggcgagcgtgttcggcgttcattttcaccgttgcggtaagctgttccatgctggcggcagtttcttccagcgcggcggcctgttcttccgttcgggaagagagatcgttattaccggtagaaatttccgtcgcgccgcgccagatattgtcgcttccggcgcggatcgtactcacggcttcgcgtaaactgtcctgcatcgcgcgtagtagcggcaccaaccggcctacgcagttacgccccaacgcttcaatcggctggctaagatcgccttgcgcgatgcgctgaaactgctgacggatgcgctccagcggtttcaccatcattgcaaccagatagcgatcggtaaaaatcaggatagcaatgcccagaatcaccgccgtgataagcaggatgcggatggtataggttttaccatcgaccatcacacgtgtgttatccagcatggcgccagcttcatgactaaaccgttccgcgctggcgccgaacgcgcgactgagtgcgggcgtgaccgtactggcatgttcgctccaggcggtcagcgatccttgctgcgccagttgcatttgaggaacgacgcctttctccagcaaggcctgccagttggacaagacctcccttgagatatcagggttcatcggccctggcgatagcgctttcatctcctccagcttctgacgcatattctcgagcgactgccgggcgggcgcaaaatcgggcgtgccgccgccgatttttacatccatcgcgcggctaaggcgggtaacaaagcggaaatattgatcgttaccctggcttagcaccgtcatttgccgcacaagatgccggtcaatatcatttccttccgaaacttcggataaagcatggacgctgtataaccccacccccgaccagagtagacaaaaaagtcccagtatcgtcagcatgaccatacgaatagtaaagttttgcagcaaacgcatatgaatttccttgctgaatataagagattagtcatcagacgatgacgcactctcgttatcggcaaggcgcggagaatatataatgcattctccatttttttacagttaccgccgtttacgtacccgcagatgttatatatctgtgaacgcagagaaaatctttcagtgttattactgagtaaatgaatagatgtagtaaaaatattgcgtaaggctgcagggagacggttatccaccgttaaagaagcgctgttttacagccgggctcagcatcctttgcccgactgccccgccgttgacggcggctcaatggttatgccgcgtcaatctgtccagatagcccatcacaaacgccgacaggacaaaggtcagatggatgatgacataccacattaatttgttatccgggacgtttttcgcgtccataaacacgcgtaacaggtgaatggaagagatagcgactatcgatgccgccaccttattttttagcgacgtcgcatccattttccccagccagttcagcttctccttgcccgcagagatatccagctgagagacaaaattctcatacccggagaacatgaccattaccagcaatccgccaaccagcgtcatatcaaccagcgataacagcaccaggatcagatcggcctccgccagggcaaaaacgttcggcagaacgtgtagaatttcctggaaaaattttagcgctaaagcgatcagcgccaaagagaggccaaaatacaccggcgcgagcagccagcgagacgcatacattacattttcaagaaagcgttccatagggacctgtcaggtaactaaaaccagcaacagtatatctcaaccatgcaacatcagatcaacatgccagttaagagcctatcccaccaggcgttattggcgcagccagtttggacacggacagcgcgcaaaaaccggagcgtacacgtagtacgtgaggtttgactcgctacgctcgcccttcgggccgccgctagcggcgttcaaaacgctaacgcgttttggcgagcactgcccaggtccaaaatggcaagtaaaatagccctaatgggataggctctaaatctcatccgggttaacctgcgggcgctgatattccggccataccagcgcgaccaatgccgggtaggcttcaagactgaactcgcgaaaacactggcgtaaattaaggacgtccaaatccgaatacggcaccttttctccgttcagacaacgcttctttatattgtcgtaatacttataaacggcagagttaaggtcgctgcaacgacgctgtgcgtcaaataatccaggcgtttcattcaactcagtcattgtcattcgttttatcgttgcatgaaggaaatcgatatattcatggttaacgcgccagtaccataccggcgttatcgaattcattaatactgagaaatgatcttcgccctcttcctttgtcatgggttcagtttgatttaaatttacgatttttccaccaggacgttttttattaacctcccacatcaggaagagtatcgcgccggtcagtaatagcaatataataacagaataaaaaatactgttcatagcaggctccattttttttgattttaaaattacgccatgttattgtcaacgaaacctacactattaaaaatagtataccactgatcgtaaaggatatttagtcatgcttcctgagcatctggtttcctctcattttcgcctgtcatcgccgccccctgaagccacagaaaacagtaaaaatttgcctaagggaaagacaaaactcagcgattacgagcccgatattttaattagcgctaacgctgccgggcaacacagaaacgtattatttgaagaacgcgaccgtcatattaaagaacgtctgtattgtgtggctaaaattgaaacgtttgcccgcctgataaacgcactacaggcagaaggcgatattgatgcccaaacgctaagtaaaatactggcggataaaaccgcaatgataaatgaaaaaggcaatgccatttggcttaatttaatcactcgcgaaaccgatatgccgctattttattcactggaagataaagatgaaagaagttgaagacaataacgtttatttggctttagacaaccataaaagtgatgaatttatcttaaagcaaaatcttgcagcgctaatcgccagcaaaaatgccaccctggaaaaggtaacgcaggaggtggtatccataccggcggcgttagtacgcctgaagtggcaaaaccgacgggagatgtatgcgttacaggtcaaagaggagatttatggcgcgaccatcaatgccattatcgagcagcatcctgaattacgagacaaaattatgtctcgtcttgaaagtgactggcagcatctgctggctcgcgagacggcaaccttacgtctgacgcgtaagctttccgatggcgactaccggacgcgcaacgtcaccaccgtcgcacggcaagaaaaataaccttcatggctagttaactctgttgtgaatacgggcgaagcataaggatcgttctgattctccctcttacggtagtaaaagtgtctacgcttaaagggtgttcaacctgaagggagaagctcaatgtctcatctatacgaccctaccacgcagtattacaccggcgagtatcctaagcaaaaacagccggcgcccggcgtccaggcgaaaatgacgcctgttcctgactgtggtgaaaaaagttatgtcggcagtggtcgccttaaagatcgtaaggcgctggtgacagggggcgactccgggattgggcgcgctgccgctatcgcttacgcgcgtgaaggcgcagatgtcgcgatcaactatctgccagcggaagaagaggacgcccagcaggttaaagcgctgattgaggagtgcggccgtaaagcggtgttattgccaggcgatcttagcgacgaatctttcgcccgttcgctggtccataaggcgcgtgaagcgctgggcgggctggacattctggcgctggtggccggtaaacagacggcaatcccggagataaaagatctgaccagcgagcaatttcagcaaaccttcgccgttaacgtttttgctctgttctggataacccaggaagcgattccgctgctgccaaaaggcgccagtattatcacaacgtcgtctatccaggcgtatcagcccagtccgcacctgctggattatgcggcaaccaaggcggcaatcctcaattacagccgtggcctggcgaaacaggtggcggaaaaaggaattcgtgtgaatattgtcgcgcctggccctatctggacagcgctgcaaatttccggcggtcaaacccaggataaaattccgcagtttggtcagcagacgccaatgaagcgggccggccaaccggcagagctggcgccggtgtatgtctatctggcaagccaggaatccagttacgttaccgcagaagtgcacggcgtgtgcggcggggagcatttaggctaacgcatgaagtcgattaaggtggcgcaattctgttaagcaaggcgccactttaggcaataaaaaagccgggtggcgacttcgccttacccggcctacagcgtcagcagaatacttatttcgctttcgcggtctcttcgccgaccagaccaatcttgagatagcccgcctgatgcagcatatccatcactttcatcagggtttcatactctacggttttatccgcgcggaagaaaatcgtagtatcctttttcccttccgtcagggccgttagctcggcaatcatcgtatcatccgtcaccggatcgttaccgataaacatggtgttatccgctttcaccgacagataaaccggtttttccggacgcggctgtggcgtactggtagaagcgggcagattcaccttgacgtccaccgtcgccagcggcgcagccaccataaagataatcagcagaaccaacatgacatcgataaacggcgtcacgttgatttcatgcatttcgccgttgtcatccaggttctcgttaagacgcattgccatgacgcattaccctacccgtaatttctgcgcggcgcgtaccggctgcgcactggcgctcgcattcagatcaagatcgcggctttgcagcagcaatacctgcgccgccacgtcgcccagcgtcgctttgtaactgcctatctgacgtgcgaagatgttgtaaatgacgaccgccgggatcgcggctaccagcccaatcgccgtcgccagcagcgcttccgcaataccaggagcgaccaccgccaggttggtggtctgcgtttgcgcaataccgatgaagctattcataatgccccatacggtgccaaacaacccgacgaagggggaaatggcgccgatcgtcgccagataaccgttgcctcgtcccatgtagcggcccaccgctgcgacgcgacgttccagacggaagccggtacgttctttaatcccttcgttatcttcgctgccctgagagagttccagttcattctgcgcttcattgatgagctgtgcgctgaggctttttgcgctgaaacctgccgcaatgtcggaagcctgatctaaagagcgcgcatcggctaattgcagttgttcgcgctttaagcggcgcttttgcgtgaaaaattcaacgcttttactgaagaagatagcccaggtgacgactgacgccagaatcaaaccaatcatcacgcacttcacgacaatatcggcgtgctgatacatgccccagacggaaagatccgtctgcatcaaattattacccactctgtatctccaggacgcaaatcacaaaatctgagcataataatatcaaaacaacgtcgaattgatagtcgttctcattactatttacatactgccgcacctttactgctttttctttgcgcttacgcattaaaaaagccacctgtttttattttggcaaaattttcatctgtatcacacgtcgccagggtgcagatggttatattcatgctagtttagacatccagacggttaaaatcaggaaacgcaacatgacggataaacagttggataccaaactggtaaacgcaggacgcagcaaaaaatacacgcttggctcagtgaatagtgtgattcaacgcgcttcttcactggtgtttgacaccgtcgaggccaaaaaacacgctacccgcaatctcgccaacggcgaattattttacggacgccggggaacgctgacccacttttcgctccaggaagccatgtgtgaactggaaggcggcgccggatgcgcgctcttcccgtgcggcgcggcggcggtcgccaacaccattctggcattcgttgagcagggcgaccacatcctgatgaccaacacagcttatgaacccagccaggatttctgcagcaaaattctcggcaaactgggcgtgacgacaagctggttcgacccgctcatcggcgctgatatcacgcaacatattcagccgaacacgaaagtcgtatttctggaatcccccggttctattaccatggaagtacatgatattccgagcattgttagtgcggtcagacgcgtcgcgccagaagccgtcatcatgattgataatacctgggcggctggcgttctgttcaaagctctggaattcgatattgatatctctatccaggcgggcactaagtatctgattggtcattctgatgcgatggtcgggactgccgttgcaaatgcgcgctgctgggaacaattgcgggaaaacgcctatctgatggggcaaatgctcgacgccgacacggcttatatgaccagccgcggtctgcgcacactcggtgtccgactgcgccagcatcaagaaagcagcctcaaaatcgccgcatggctggcgaaccatcctcaggtcgcgcgcgttaatcatccggccctgccgggtagcaaaggtcatgcgttctggaaacgagactttacaggtagcagcggcctgttctcctttgtgctcaataaaaagctgaccgaggcagaattatcagcctatctggataacttttcgctgttcagtatggcctactcctggggaggctacgaatcgctgattattgctaatcagccggaacagatcgccgcgattcgtcccgcaggcggcgtagattttaccggtacgctggttcgggtgcatattggtttagagagtgttgatgatttgatcgctgatttagccgccggcttcgccagaattgtgtaaagttgccggggatggacatatatgcagacaatttccgtggaaaagtctgcgtttgttgcgtccgggatcaaggcatcccggacgattcaggagtacaataggcgaataaaagcataaatgctgttccacaggaaagttcatggctgtcattcaagatattatcgctgcgctctggcaacatgattttgccgcgctggcgaatccacacgttgttagcgtcgtctactttgtcatgttcgccacgctatttttagaaaacggtctgctgccagcgtcattcttacctggcgatagtctgctgctactggcaggcgcgttgatcgcccaggatgtgatgcattttttgccgacgattggcattctcaccgccgcggccagtctcggctgctggctaagttatatccagggacgctggctcggtaatacgcgtaccgtcaaaggctggctggcgcagcttccggcaaaatatcatcagcgcgccacctgcatgtttgaccgtcacggtttgttagcattgcttgccgggcgctttctggcgtttgtccgcactctgctgccaacaatggcgggcatttccggcctgtccaaccgccggtttcagttttttaactggttaagcggcctgctgtgggtgactgtcgtgaccagcttcggctacgcgctcagtatgatcccgtttgttaagcgccatgaagaccaggtaatgacatttttaatgatccttcccgtcgcgctactggtcgccgggctgttaggtacgctggtcgtggtgattaaaaagaaatactgtaacgcctgacgtatccataatcggccaggatggcccggttacgcttcgttgacccgtggcgggatgccccacttagctcccttgcattgtccgcattcttgccacatcttcgcccggcgtaacgccaaaataacgtttaaactcccggctaaactgcgatgcgctctcatagccgacccgcatcgccgcggcgctggccttcataccgtcgtgaatcatcatcatccgcgctttatgcagtcggtagctttttaaatactgcaacggcgaggtgctggtgaccgccttaaaattatggtgaaacgccgacacgctcatgttcgcttctgccgccagttgctcaacattcaggttctcggtgtatttcatttcgatctgtttaagtacgcgactgatcaggctaaagtgcgtctggcgactaaccagcgcaagcagcgccccgccgcgcggccccatcagcacatgataaagaatttcgcgaataatctgttttcccagaatccgcgcatccagcgggcgctccatcacatccagcaatctttccaccgcacataaaatctcgtccgacagcgtggcggagttaatcccactggccgccatcggcaactggaaacgctcatcttcgccaatgtccatgagcaactcttgcagttgcagcacatcaatatcgagccgaataccggccagcggtacctccggcgtcgcccaggtctcgcattcaaaagggagcggcacggtcagtaagagatattcattagcgtcataacgaaacttgcgcttgttaatatagccaattttatggccggaaaagagaaatatgatgccaggctgatacatgaccggcgtgcgcggccccggttcaacaccatacaacagacgaatgcccgccagccgctcgctgattattttatcattattttttaaatgattaattttatccgccaactgtaagcaaattgcttcacgattcataacgcgccattttttcatcaaatccactccgctggattgtgcgcatttttagcgattttctccagcattctggagaaataggcaaaacattggcagaaatgtgcattgagagacatccctcacaagaccacaatgatgaccatcaggcagacagccgcctgccctctttttacccacataagggaatgagcaatgaacaatttcaaattacatacccctacccgcattctgtttggtaaaggcgctatcgtcgatcttcgcgatcaaatcccgcaggacgcccgcgtgctgattacctatggcggcggtagcgtgaaaaagaccggcgtactggcgcaagttcaggaagcgttaaaaggactggatgttcgggagtttggcggtattgaaccgaacccgtcctatgaaacgctgatgaaggccgtgcagcttgtgcgcgacgaaaatattaccttcctgctggccgttggcggcggttccgtactggacggcaccaaatttatcgccgcagcggcgcagtatacggacggcgtcgatccgtggcacattctggaaaccggcggtactgagattcgtagcgcaatcccgatggggtctgtgctgaccctaccggcaaccggctcagaatcgaacgccggcgcagtcatttcccgtaaaaccactggcgacaaacaggccttccactcctcgttcgtgcaaccggtgtttgccgtactggacccggtctacacctatacattgccgccgcgccaggttgcgaacggcgtcgtggatgctttcgtccataccgttgagcagtacgtcacttacccggttaacggcaaaattcaggatcgtttcgccgaaggtattttactcacactgatcgaagaaggtcccaaagcgctgcaagagcctgaaaactatgacgtccgcgctaacgtgatgtgggccgctactcaggcgttaaatggcctgattggcgctggggttccgcaggactgggcgacgcatatgctgggccacgagcttaccgcgatgcacggtctcgatcatgcccagacgctggctatcgttctgcctgcgctatggaacgaaaaacgagacgttaaacgtgcaaaactcctgcaatatgctgaacgtgtatggaatatcaccgacggttccgacgacgagcgtattgatgccgccattgccgccacccgccgtttcttcgaacagatgggcgtgcctacccacctgtccgattacggtctggatggcagcactattccggcgctactggctaaacttgaggcgcatggatgcataaatttaggtgaaaatcaggatattacgctggatgtcagccgtcggatttatgaagcggcgcgctaaggttttttcgcctctgactttcgtttttggccatttcgtccagacttaagtcacttagtctcgccggacccgactccggcgagccaattaaaagaggaacacatcatggctaatccaaccattatcaggctacaggatggcaacgtaatgccacaacttgggctgggagtctggaaagcaagcaatgaagaggtgatcgcggcgattcataaagcgctggaggtgggctatcgatcgattgataccgccacagcatatcagaatgaagaaggcgtcggcaaagcgctaaaagcagcgagcgtagcgcgggaagagctgtttatcaccaccaagttgtggaatgacgatcaaaaacgtccccgcgaagccctgcaggagagtctgaaaaaactgcagcttgattatctcgatctctatctgatgcactggcctgtaccggctatcgatcactatgtcgacgcctggaagggcatgatcgcgctgcaaaaagaggggctggtaaagagtatcggggtctgtaactttcagatccatcacctccagcgtctgatcgatgaaaccggcgttacccctgtgatcaaccagatcgagcttcaccccttgatgcaacagcgccagctacatgcgtggaatgcgacgcataaaatccagaccgagtcctggagcccgctggcgcagggtggcgaaggcgtattcgatcagaaagtgattcgcgaactggcggataaatacggcaaaacgcccgcccagattgttattcgctggcatctggactgcgggctggtcgtcattccgaaatccgtcaccccttcccgtatcgcggaaaactttgctgtctgggatttccgtctcgataaagatgaattaggcgagatcgcaaaactggatcaaggaaaacgcctcggtcccgatccggatcagttcggcggttaagccggatttatcgcacgccatgcccgacgatgtcgtcgggcttttttgcattccgaaacattaagaaacaattacgcgcatttaacagtatatttcccccacacacaagcgcagaattattctgattttgtgaataattattcatatttattatgaatttacttaatgcatataaaatatttatggatgtgtgattgtggcggaaaaaaaatctcagggcgtcaaatggctcccattcattcttattctggttatcgccgccggactgtggcagctaacgcccccttccgggttaagcgcgccggcctggcattccgcgattatttttgtcgcgacgatcgcctctatcgtggcgaaagtgctgcctattggcgcggtcggtattattggtatcaccgtctttgcgctcgcctatgctgccggcgacaaaacggccagcggcgcgattaccacggccttgagcgagctgaacagttcgctgatctggcttatcgtcgtcgcctttatgattgcccgtgggtttatcaaaaccgggctgggtcggcgtatcgccctacaaatgatccgtctgttaggtaaacgaacgctgggtctggcttatggtctggcgtttgccgatctgatcctctctcccgcgatgcccagtaacaccgcgcgctgcggcggcgtgatttacccgatcgccgactcgctggcgcgcagctttgattcacatccggaagatgagtctcgcagcaaaatcggcacctttctgatcacctgtattggcaatgttaacgacgtcactgccgcactgtttatgaccggttatacgggtaacctgctggcggtaaaactggcggcgaacgccggcgttacgttgagctggggaagctggtttatcgccgcgctcctgccttgcctggtctcttttcttatcgtcccgctgctggtctactggctgacccgtccggaaattaaacatacgccggatgcgccggatttggcgcgcaaagagctggcgcaaatgggcagtatgacgcgcggcgagtggctcatgctggcgaccgtcggcgtgttgctggtgctatggatttttggcagctcgctcggcgtggatgccacgacggcctcttttgtcggtctctctattttattactgagcggcgtgctcacctgggaagacgttaaaagcgaaaaaggcgcctgggatacgttgatttggtttgccgcgctgctgatgatggctaaccagttgaagaaactaggattcaccagctggtttggcaacctgattggcgacagcatcggcagcacgatgcatggaaccagttggataatcatcctgctgctgcttaacgcagcctatttttatacccactatttttttgccagcggcaacgcgcaaatcgccgcgctgtatgcggtatttctgggcgtcggtctgcatctgaatataccggcggcgccgatggcgctcatgctggcgtttaccagcagcctgtactgctctcttacgcagtatacccacgcacgcggccccattctttttggcgccggctatgtaccgacgggcgtctggtggcgaacgggatttattatcagtctctttaatcaggcggtctttttgacagtcggcctcgcatggtggaaagtgttagggttgtattaaacgcttaacgcatcgataagcccctcggttaacggagaaatggaatgacctgcattttctgtcaaatagttgaaggtaaagcaccttgtcataaagtttgggaagatgagcatcacctggcttttttgtcgatttttccgaataccgatgggtttaccgtagtgatcccgaaaaaacattaccccagctacgcgttcgatctaccgccgcaggcgttagcggacctgatgctggcgacccaaaaagtggcgaagaaactggataaggctttcccggatgtcagtcgtacgggaatgttcttcgaaggtttcggcgtagaccatgtgcacagtaaattaagccccatgcacggtactggcgatttaacccactggaaaccgattgaatcgcggcagaataaatttttcgaacagtatgaaggatatctgtcgtcacacgatcatgaacgggctgatgatgaaaaactggccgcgctggcggccagaattcgtgaggcataaatacggagcacttctgccggatggcggtgtaagcaccttatccggcctacaaaactgtgctattcatagacctgataagcgcagcgccgtcaggcattataccttagattatatacttcttatctattttaatatatcaaccctggtaggttaaatattacggcgcgtggctaaatatttcgtacaaaaaccatccaggaatagcggcaataacacccattaaaattatccctgcaagagtcatttgcctgtcttcacgtttttccatattacatgctttaatagccattatgaatataacaacagctattatagcaattacgataaaacagggaataataatcatacccatgatatcccctcctctggggctgtatacaagcatcatgccttaatcattaaggtaatatataattaatttatacaatcaataatatttaaataaaatataaagctccccgtaatttagcaattactaaagatcgacacaatatatttagatgtctgttacttccagaaacattagcttccagaagcaacagattcaaaggtaattaacgccctgcgcctttcccgcgcttcttattcgcagcaagcccctgccgctgatgttccaccggcgtatgcttggtcaacgccgggcgcgtgttgcggttctggcgacgcgcttcgcgcatctcttcaatggtcggcgcaggcaccagacactcacggcgaccgccaatcaaatgctttttccccatcgcttccagcgcctggcgaatcagcggccagttcgccggatcgtgataacgcagcagcgccttatgcaggcgacgctgcctgtctcccttcggcaccaccacatcttcactcttataaccaattttacccagcgggtttttgccggtgtaatacatggtggtcgaatttgccaacggcgacgggtagaagttctgcacctgatccagacggaagcggtggcgcttgagccacagcgccagattcaccatatcctcgtcccgcgtgcccggatgcgcggagataaaatatgggatcagatactgctcttttccggcctgtttagagtaaaggtcaaataactctttaaagcgatcgtagctgcccatacccggcttcatcattttcgacagcggaccttcttcagtatgctccggcgcaatcttcagatagccgcccacatgatggctcgccagctctttaatgtagcgaggatcttctacggcgatgtcgtagcgcacgccggaggcaattaagattttcttaatgcctttcagctcacgggcgcggcgataaagattgatcgtcggcgtatggtcagtatccatatgcggacagatatccggatagacgcatgacaggcgacgacaggtctgctccgcacgcggcgacttacagcgcagcatatacatgttcgcggtaggaccgcccagatcggagatcacgccggtaaaccccggcaccgtgtcgcggatcgcttcgatctcgttgatgatagagtcttctgaacggctctgaatgatgcgcccttcatgttcagtgatcgagcagaaagagcagccgccaaagcagccgcgcatgatattgatcgaaaagcggatcatctcataggccggaatacgggcattgccgtaagccgggtgcggcacacgctgatacggcagcgcaaacacgctatccatctcttcagtggagagcggtatggcgggcgggttgatccagacatagcggtcgccgtgtttttgcatcagcgcccgcgcgcagccagggttagtttcgtgatgcagaatacgcgacgcatgggcgtacagcaccttgtcgcctttcaccttttcaaaggatggcagcaggatataggttttttcccacggcttcggacgcggcggctgcacggtaatcgctttagcttcctgctttttcggcgcgaccggcttgttatccgcgcacggcagatcctcgccatagggatggggaattggatcgattttacccggcgtgtccagacgagtggagtcgacgccgctccagcctggcagcgcttctttaaccataatcgcagtgttacgcacatcacgaatctgatcgatggtttcgcccattgccagacgatgcgccacttccaccagcggacgctcgccgttgccaaacatcagcatgtcggctttggaatcgactaacactgaacgacgcacagtatcagaccagtagtcgtaatgcgcggtacggcgcagactggcctcaatgccgccaaggatcaccgggacatctttccacgcttctttgcaacgctgggtatagaccagcgtggcgcggtccgggcgtttgcccgcgacgttatccggggtgtaggcgtcatcgtggcgcagcttacggtcagcggtgtaacggttaatcatcgagtccatgttgccggcggtgacgccgaagaacaggttcggttttcccagacgcataaagtcgtctttgctgttccagtccggctgggcgatgatccccacgcggaagccctgcgcttccagcatacgaccgcaaatcgccatgccgaagctcggatggtcgacgtaggcgtcgccggttaccagaataatgtcgcagctatcccagccaagttgatccatctcgtcacgtgacatcggcaaaaacggcgccggcccaaagcaggcggcccagtactgcggccaggagaaaaggtcgcgatccggttggatcagggagatagcgctcataatgcttccaaaacgattggcaaaaaaataatcaaaggtcggggattataagccgtatctatagcgaaaatgaaggagattatcgccttatatgcaggactggcgcgaaatagaaacaactttcaacggcctggcctgaggtgtttgaaattggtcttatgaatatcttcaaattggtatgcaattaattatacccacgtctaaaaacgcagtatcgtcataacaacaaaaagtaaaaaaacatcacattatcagtaatatataaaaaaacttcgctgaattgctcacgacactgtttttaccatgactttcttctgtgaaccagatctctttctttggtctattgattaaattaaattggctgacagaattcaggggataaagaacaccatcaccacgcctttccccaacgcaacaccttacgtatcagcaggttattaattaatcaacgataaccacaggaatcccaacctataaggaagcagatatgaaaaacacacgttcattcacaacatcagcggtattactggccggctgtttgctactggcatttccagcgctcgccaaaaccacgctgaaactgagccacaatcaggataaaagccacgccgttcacaaagcgatgagctatctggccgacaaagcgaaagcctattcggacggcgaattaaatattcgtatttaccccaacgccacgctgggcaacgaacgtgaatcgctggaattgatgaactccggcgctctgcaaatggtgaaagtcaatgcggcatcgctggagtcttttgcgccggaatatagcgtgtttagcctgccgtttttattccgcgaccgcgatcactactacaacgtactgaaaagcgacttagggaaacgcattctcgcgtcctccgaaagcaaaggcttcgtcggcttaacctggtacgacggcggcgcccgcagtttttacgctggtaagcccatcactcaacccgacgatttagccggtatgaaaatcagagtgcagcaaagccccagcgctatcgcgatggtgaaagctctcggcggcgtgccgacgccgatggcgcaaggcgaactctataccgcgctccagcaaggcgtggtcgatggcggcgaaaacaaccccgtggtttatgccgatatgcgtcatgcggaggtggcgaaattctattcccgcgacgagcacacgatggtgccggatgtcctggtcatcagtaccaaagtacttaacaaattgagcgataaagagcggaaggcgttatataaagccgcagatgaatccatgcagcaaatgaaagatgtcatctggcccgccgcggaaaaagaggcttatgagagcatgaaggccatgaacgcgactgttgttgatattgataaatccgcgttcaaacagcgtgttaagcccttgtttgatgagttccgcgcaaaagacgctcagtcagcgaaggatctggaatacatcgagaatatgtaaatctgccgggcagggttctcctgccctttacaggatgtaatatgcgaatactcaccaatgcactgaacaaaatactggccgggtgctgctgtattattctggcggtcatggttgcctgcgtatcctggcaggtggcggcgcgctttatattcaacgcgccaagcagcacgctcgacgaattcacccagattctttttatgtggatgattctgctaggcggcgtctataccgccggattaaaaaaacatttagctatcgatttgttagcgcaaaaactctcccgaacgcccgccctcatgctcgacagtatcattcaggtgattattaccgtgttcgcgctgatttttatggtgtacggcggtgatattattgttgaaaaagcggcgcacgtcagccaaatgtccccggtattaaaatggcctatggataaagtctattgggtcatgccgattagcggcgtcatcctggtgtactacaccattgtgaacgttattgataattatcatcagcgccatcttcgctaacgagggatatatggactttgaatatatttacccaataattgttttatttggcagctttgccattatgctggcggtcggcgttcctattacattcgctatcgggctgtcgtccttattctcaatcctgatagcccttcccccggatgcggcaatctcggttatttcgcaaaaaatgaccgtcggtctcgatggctttacgctgctggcgatccccttttttgtgttagccggcaatatcatgaataccgggggaatcgcccggcgcctggtgaatctggctcaggcgttagttggccgccttcccggttcgctggcgcactgcaatattctggcgaacaccctgtttggcgcgatatccggctcggcggtcgcttctgcggccgcggtgggcggcatcatgtcgccattacaggaaaaagagggctactctccggcgttctctacggcgatcaacgtcgcttcggcgccgattggcctgatgatcccgcccagcaatgtgctaattgtctattcgctggctagcggcggcacctctgtcgccgccctgtttttggcgggctacctgcccggcatcttaaccgcgctggctttaatgacggtagcggcgctgtatgcccatcgccaccattacccggttgccgaacgcatcaacctgcggcagtttctgtcggtattccgcgattcgttgcccagcctgttgctgatatttattattatcggcggcattatcggcggcgtatttacgccaacagaggcctctgcgatcgcggtaatctatagcctggcgctggcggccatttatcgagaaattaatgtgagtaagttgcgcgatattctgctggattcggtagtaaccagctctattgttctcttactggtcggctgctcaatgggaatgtcatgggcgatgaccaatgctgatgttcctgaactgattaatgaaatgattaccagcgtgtccgaaaataaatgggtcatcttgctgattatcaatctcattttgttattcgtcgggacgtttatggatattaccccggctattctaatctttacgcctattttccttcccattgctcaacatctgggaatcgaccctgtccattttggcattattatggttttcaatttaaccatcggactgtgtacgcccccggtaggcactattttgttcgtcggttgcagtatcggcaaaatcagtattgataaagtcgtcaaaccgctattaccgatgtttctggcactctttgtggtcatggcgatgatttgctacttcccgcagttgagtctgctgcttcccacgctgtttgctccttcctgaaaaccctgacgggtctgcgctattcagacccgtactcggacgctttacgacgctggattcaccagcatttgcccaatcgagccgcggtcagccatttccagcgtctggctgttgaaatagaacgggaagtgcggccaggacggctgaccgtaatagaccagcagttcgacttgcccatccacccagacggtatctttccagcctctatcttccgggaacggcatagcgccgttgacgttacgaatcaggaaagagacgccctcaatatggaacgactgcggcatatcggcgcgtaccgtccagcgctcccaggtgccttgttgggcggtaatatcaatgcgattcacatcccacagttggccgttaatccccggatcgtcgccaagactgatgtcccgactgcggacaggcgcgccgctcatgatctccgtcggcaacagacgcatcggcagattatcggtcaccagcggcagcaatccggttggccgtaacgtcagcaccagggtcgaaaccagaatactggaaggctcaaagaaaccgcgaatccgatcgactatgctggccgcttccccgcaggtgatcgagacttcgtcgccgttggtcatatcaaccaggatttcacgtcgctcgccgggcgccagtgacaactgtttgacggaaaccggcgcaggtaaaaagccctgatcgcctgaaatcacatgcagcgcccggccatcgctcatctgaagctgatagcgccgcgagttcgaggcgttcaacaaccgtaaccgcacccagccgcgggacacttcgacataggggctttgcgcgccgttcaccagcagcgtatcgccgacaaaaccaccgcttcccggttcgctgtactccggcgtcccaaagttatccagccgtttatcctggataatgacgggaaaatcatccacgccgtaatggttcggaatgggcagcgttttactgatgtcgtcttcgaccagccacattcctgccaggccgttatacacctgctgcgcggtgcggttaggcgtgttagcgtgataccacagcgtcgcggcgctctgacgaatcggcaacaccggcgcccagtccgcgttcggcgacatcatacgcgccgggccacccatcagcggccccggcaccagtaaaccagcaaccgtcatggagacattttccgccaggcggttgctatagatgagtttaacgtcatcgcctttccagacgcggattgtcggccccagataacgaccgttcactccccagaccggcgcgcgcgtgccttgcgtaaaggaccagtgcgctcgctgtagcgtcataaacaacggctgcccgcgacgggactccagcaacggcggaacaggcaacggctgttgctgaccggcagcattcgccctgaggggaatcgcgcctgcacatagtgcgattcccgatgcctgaagaaactgacgccgactgaatgacatataagctccatgtaaaacaggctaaagagttgtgcctgaaaaaatgatttctacaataacagagtaaggctgcttaaaccttaccggtcgcttcacgttccgcaacctctttatcaagttccgcgattttttgctccattaacgcacggcagtgggccgccagctcgcgaacctgatctttaccatattcgctgacgtcgactggcggcagcatttccacaataaccagtccgttgttcaggcggtttagattgactttgttagaggtgttggaaacgcagacaggaatgatcggcacaccagccgcgatagccgcatgaaacgcgccggttttaaacggcagcagaccgcgtccccggctacgcgtaccttcagggaacatccagatagaaatacgacgctttttaaaatggttaaccactgccgcaatggtgctatgcgctttggcgcggttattacggtcaatcaacagattaccggtcagccagtacagttgcccaaaaaacgggatccaaagcaggctttttttccccaccgtcaccgttggcggctgcacaatattcgccgccgtgaccatatcataattattctgatggttagcaatatagatagcattgccatagttttccgcgtcggcgggtttgcggcactccactttcaggccaaacagcggggccagacggccgaacatatgtccaaacgtcgccacgtgttttgggttacgtgggctgaaaaggcagtaaatagaaccgaaaacacagaccagaatggagtaaataacggtaacaataagacgaaaaatatatagcataacaacctctgaaggcctaagagcccggcattctacgtcacctgaaattcaggttaggattttggtaagtgtggctctctggaaaaacgtattgttaatcgcaatgcacgaataaacaacggttttacgggaaattttaatgttaatccgatctgaaaccgtaggccggataagacgctactgcgtcgtcatccggcaacggcagagcgccggatggcggcttagatgccttgtccggcctacgggcgcccctgtcttactcttcgctgtcgccatgacttacgcgatgcggcgaatcaatctcaatgcgatcgatacgctgcaggccgcgcattaatgtgccacggcgtccgcgttcaccgaccaccttttgtaactcttcagggcgcagtttgattttgcgcttcccgacatggatagtcagagtgctttgtggcggcagcacgtacaggtgcgccagtccatcatcgcctttcgccgcttctgcagaggggatattaatgatcttattccctttgcctttcgacagctgcggcagagagtctaccgggaacatcaacatccgtccggcctgggtaatcgccagcagcatatcgtgctcgtcttcaatcaccagcggcggcatgacgtgcgcattttccggcagtgtaatcaatgtcttaccggcacggttacgggcaaccagatcgttaaacgtacaaacgaagccgtagcccgcatccgacgccatcagcagtttctggtcatcgccttccatcagcatatgctctacggtcgcccccggcggcagcgtgagtttgccggtcagcggctcgccctgcccacgcgccgacggaagcgtaatgggatcaatagcatagctgcgcccggtggtatcaataaacaccaccggttgattgctcttacctttcaccgcggctttaaagctgtcgcccgctttatagttaagccccggcgcatcaatatcatgacctttggcgctgcgcacccagcccatctgcgacagcacgatagtcaccggttcggacggcagcatatcgtgttcgctcatcgctttagcttcttcgcgctcacgcagcggagaacggcgatcgtcgccataggcatcggcgtccgcctgtagttcttttttcagcaaggtattcattttgcgttcggacgcgagaatgccctgcaactggtccctctctttttccagctcgtcctgctcgccgcgaattttcatctcttccagtttggcgagatggcgcagtttcagttcgagaatcgcttccgcctgggtttcgctgatgccgaaacgcgacatcagcgcgggttttggctcgtcttcgctacggataatctcaatcacttcgtcgatgttgagaaacgccaccagcaaaccttcgaggatatgcaggcgcttaagcactttctccagacgatagttcagacgacggcgcaccgtgtcgcggcggaacgccagccactcggtgaggatctccagcaggtttttcaccgccggacgaccatccagaccgatcatgttcaggttaatacggtagcttttttccagatcggtggtggcgaacagatggttcatcacctgttccatatccacacggttggagcgtggcacaatcactaaacgcgtcgggttttcgtgatccgattcatcgcgcagatcgtccaccatcggcagttttttattacgcatctgcgcagcaatctgctccagcactttcgcgccagagacctgatgcggcagcgcggaaattaccacagcgccgtcttctttggtccataccgcgcgcatacgcacggagccccgcccgttttcgtaaattttacgaatttccgcacgtggggtaatgatctccgcttcggtcgggtaatccggcccctgaacgatatccagcaactgatccagcgtcgttttcggctgctcaatcagcgtaatcgccgctttcgccacttcgcgcaggttgtgcggcgggatatctgttgccatgcccaccgcaataccggtggtgccgttcagcaggatgttcggcagacgcgccggtaacattttcggttcctgcatggtgccgtcgaagtttggcacccagtccgccgtcccctgaccgagttcgcttaacagcagctcggcgtatttggacaggcgggattcggtataacgcatcgccgcgaatgacttcggatcatccggcgcgccccagttcccctggccatcgaccagcgggtaacggtaagagaacggctgcgccatcagcaccatggcttcatagcaggcgctgtcgccatgcgggtgatacttacccagtacgtcaccaacggtacgggcggattttttaaatttagcggtggcgttcagccccagctctgacatcgcatagacgatgcggcgctgtaccggcttcaggccgtcgccaataaacggcaacgcacgatccatgatcacgtacatggagtagtttaagtaggcgttttccgtaaattcatgtagcgcaaggcgctctgccatatcgctcattaacaggggatcctcaatctgcatgctgaccgttcggacggcaatattgccgcagataataccctatctcacggtctgagtcacaaaccgtgagacaggtggcgaggaagttaacgaagcggcagatagatatccgtcagcagctcatgttccgcgacctcatggacgaaattcaggtactggaagaagaccggaaaatcgcgcggcgtctcaccgctggcgggtagccattcgcggaataaataccacacgctctccgggaggctgtcgagcgatccctgatggcgcaccaccgcgcagcgcccgccaggaatctcgctattcaccacgccaacgtcattttcggctatcggctggcggacgctgccgcagatatcaaagcggaattgagccggcggcgtcgtctgcgggtcgtgccaggcaataccaaaagtttgactgctggcaatcggcgactggcccgtttcgcgtcgccatgcaataaatttcgccgcgctggcgttgaccttatccggatgccccagatgcgtcagcatcgcgacgcgggtaggtggaaattcaacgatttttacgtccatgacatgctgctcctgtaacgcaagtttaggaacgcgctggtgccaggccagccagtccggcgattgccgaaaccggcgcgggctttgaccaaacgcggttttgaaagcacgtgtgaacgactccggattctgaaacccggcatccagcgcgatatcgataactttatcctgcgggttaaacgccagccgccatgacgcgcggcgcaaacgcaaccactggatatagcgatagagcggaagcccgctccaggtggtaaactgccggtgaaaatgaaacggcgagctgtgcgccatccggcttaacgcctcaatcgacagaggctcatccagatgacgctcaatgtggtcgcaaacgcgccgcagacgttcggaataagccgcgctgatcaggtcattcatcactgcctccttgtggcctattctgcccaccgggcggctgtgaatcctgaccgatcttgcgcaatgtgggattacggattcactttacgaatctgttttacgtcgatttcgacagagttccagtctttatccacttcgccctgaatttcaacggtatcctgcggggttacggtcaggccgttccagcgcttgtggtcaatgtccacattgatagtaccggtcgcatctttaaacacatacagatcgtcggaaatgcgctcgacgatattcccgcgcagcgttacccacgcatcgtcacgcagcgatttagcgctctctaccgtcgtgctgctgccgttcgggccgacaaatccgccgccttgcgtttgcgtcgccgacgggccggagaaaccgccctgctgagccgccagaaccggggtagaacacagtgccataacggcaacgattgcagctaattttttcatgattacttttccctttcatgtcgtttcagatccatttaataaggtaatccttaacaacttcttaaggcaaaaaaagaatctttttttctgtacatcgcctgcggcgacaaggttaactgacggcaacgcgagttaccgcaaggaagaacagatgcgaattttactggtagaagatgacacacttattggcgatggcataaaagcgggcctgagtaaaatgggtttcagcgtcgactggtttaccgagggacgtccgggcaaagaggcgctttacagcgcgccttatgatgcggttattttagatttgacgctgccaggcatggacggacgggatattttgcgcgaatggcgcgaaaagggtaaacaggaaccggtactgatcctgacggcgcgcgacgcgttagcagagcgcgtcgaggggctacgtctgggcgccgatgactatttatgtaaacctttcgcgctcattgaggtcgccgcccgtctggaggcgctggtacgccgcgccagcggtcaggccagtagcgaattgcgccacggccaggtgacgctcaatccaggcaatctcgtcgcgacgcttgccggcgaaccactggccctaaaaccaaaagagttcgcgttgctggaactcttactgcgcaacaaaggtcgcgtgctgccgcgcaagcttattgaagagaagctgtataactgggatgacgacgtgtccagcaatgcagtggaagtccatgttcatcatttacgccgcaagctcggcagcgaatttattcgcaccgtgcacggcatcggctacaccctgggtgacgcatgaaattgacgcaacgtctcagcctgcgcgtcaggctgacgcttattttcctgattctggtctccatcacctgggcaatctccagttttgtggcctggagaaagacgacggataatgtcgacgagctgtttgacacacagttgatgttgttcgccagacggcttagcaccctcgatcttaacgagatcaacgccccgcagcgcatggcgcatacgccaaagaaattaaaacatgggcatatcgatgacgatgcgctggcgttcgccatcttttccgctgacggcaaaatgttgctgcatgatggcgacaacggccaggatattccgtatcgctatcgccgggaaggtttcgacaatggctatctgaaggatgacaacgacctctggcgttttttgtggttgaactcggcggacggcaagtatcgtatcgtcgtcggtcaggagtgggattaccgcgaagatatggcgctggcgatcgtggcggcgcaattaacgccgtggctgatcgcccttcccttcatgctgctaattttattactcctgcttcaccgcgagctcagaccattgaaaaaactggcgcaggcgctacgcttccggtcgccggaatcggaaacgccgctcgacgccaaaggcgtaccgagcgaggttcgcccactggtcgaagcgcttaatcagctttttagccgcatccactccatgatggtgcgcgaacggcgatttacctccgacgccgcccatgaattgcgcagcccgctggccgcgctgaaagtacaaaccgaggtggcgcagctctcgggcgacgatccgctatcgcgtgataaagcgctgacccagctccatgcggggatcgatcgcgccacgcgactggtcgatcagctactgacgttatcgcgtctcgactcgctcaataatttgcaggatgtagcggagatttcgctggaagagctgctgcagtccgcggtaatggatatttatcatccggcgcagcaggcgaatatcgacgtgcgtttacagcttaacgcccatgacgtcatacgtaccggccagccgctactcttaagcctgttagtgcgtaacctgctggataatgcgattcgctacagtccgcagggcagcgtcgtcgacgttaccttacatgcccgcagcttcaccgtcagagataatggccccggcgtagcgccagagattctgacgcatatcggcgagcgtttttaccgcccgccaggccaaagtgtgaccggcagcggtctgggattatcaatcgtccgccgcatcgctacgctgcacggcatgacggtgtcgtttggcaacgccgcggaaggtggatttgaggccgtagtaagttggtaacagagacttttgccaaaaacgcaaaagactttgcacattttgctaatttcaccgcaccgcccgtcagcgtagaatcagcagcaaacgcatttcttgaggacacaaaatgagtaacatcctgattatcaacggggcgaaaaaattcgcgcactccaacggccagttgaatgacaccctgaccgaagttgccgatgggctgctgcgcgatctgggtcatcaggttaagatcgtccgcgccgacagcgactatgacattaaagaagaggtgcagaatttcgtctgggctgacgtggtgatttggcagatgccaggctggtggatgggcgcgccatggacagtaaaaaaatatatggatgatgtctttaccgaaggtcacggtacgctctatgccagcgatggccgcacgcgttccgatgccgctaaaaagtacggttccggcggtctggtgcaggggaaaaaatatatgctgtcactgacgtggaacgcgccgatggaagcatttaccgaaaaagatcagtttttccacggtgtaggcgtagatggcgtctatctgccattccataaagccaaccagttcctgggcatggacgcgctgccaacgtttattgccaacgacgtgattaaaatgccggatgttccgcgctataccgcagaatatcgcaagcatctgagcgaaatttttgcttaactggtcatcctggaattagaaggagttaaccatgcttaccgtcattgccgaaattcgcacgcgtccgggccaacatcaccgtcaggccgtcctcgaccagtttgcgaaaattattccaaccgttcttaaagaagaggggtgccacggttacgcgccgatggtggatcatgccgcgggcgtgagttttcagactctggcgcctgactcgatcgtgatgattgaacagtgggaaagcgttgcgcaccttgaggcacatctgcaaaccccgcatatgaaagcctacagcgacgcggtaaaagacgatgtgctggaaatgaatattcgtattctggaatccggcgtttaagttattaccctcgtctgacgtcgccctgatgcgatgcgcaagtgtcgccatcaggctgcggcgtcatgtcggattcgcttatccggcctgcggcatgcagaccagataaagcgtgcaacaaccgttacacgtcgagatccgcgagatcgcctttttcctgtagccagttgcgtcgatcttcagaacgtttcttcgccagcagcatatccatcatcgcattagtacgctgatcgtcttcatcgctaatggtgagctgcaccaggcggcgagtattcggatcaagcgtggtttcgcgtaactgcatcgggttcatttctcccaggcctttgaaacgctgtacgttcggcttgcctttcttacgcttcagttgttccagtacgcccgccttctcttcttccgtcagcgcgtaatagacctctttacccaaatcgatacggtatagcggcggtagcgcgacgtagacatgaccattcttcaccagcgcgcggaagtgtctgacaaacagcgcgcaaagcagagtagcgatatgcaaaccatcggagtccgcatccgccaggatacagatcttgccgtagcgcagctgactcagatcgtcgctgtccggatcgataccgatcgccacggaaatatcatgcacttcttgcgaggccagcacttcatcggaagagacctcccaggtgttaaggatcttacctttgagcggcatgatcgcctgatattcgcgatcgcgcgcctgcttggcggaaccgcccgccgaatccccttccacaaggaacagctcggtccgattaagatcctgcgcggtacagtccgccagtttccccggcaacgccgggccgctggtgagctttttgcgcaccactttttttgcggcgcgcagtcgccgctgcgcgctggcaatcgccatctctgccagttgttccgccgcctgcacgttctggttcagccacaggctgaaggcatctttcaccacgccggaaacaaatgccgcacattgacgcgacgacagacgctctttggtctgcccggcaaattgcgggtcctgcattttcacggaaagcacataagcgcagcgatcccagatatcttccgccgacagtttgacgccgcgcggcagaatattgcggtattcgcaaaattcgcgcatcgcgtcgagcaggccctggcgcagaccgttgacgtgcgtccccccctgcatggtcgggatcaggttgacgtagctttccgtcagtaattcgccgccttccggcagccacaatagcgcccagtcaaccgcttccgtttcaccgttaaaattaccgataaacggcttttccggcagcgtcggcaggccgtttaccgcttcgcccagatagtcgttcagaccatcctggtagcaccagcgctgctcgctgttattcacttcatctttaaaagtgatttccacgccgggacacagcaccgcttttgctttcagaacgtgcattaagcgagagacagaaaaacgcgggctgtcgaagaaactttcgtccggccagaaatggacgctggttccagtattacgtttaccgcaggtgccgacaacctgcaaatcctgcactttttcgccgttttcaaacgcgatgttatagacctgaccgtcgcggcgcacggtcacttccacgcgctttgacagggcatttactaccgaaatccccaccccatgcagaccaccagagaactgatagttcttattggagaatttaccgccggcatgaagccgacagaggatcagttctaccgccggaaccccctcttccggatggatatccaccggcatcccgcgtccgtcgtcaatcacttccagcgattgatcggcatgtaaaatgacatccacgcgtttggcgtgacctgccagtgcttcatccacactattatcaatcacttcctgacccaaatggttggggcgggtcgtatcggtgtacatccccgggcggcggcgtaccggctcaagcccagtgagtacctcaatggcatcagcgttataagtttgcgtcatggtttaattagcaattcgaattgattgtcagcaactgtgcagtccaagaaaatcgacaatctggttgaaataatcttcgaagcccgtgaatgcgtgattaccaccctcggtcactgtctgacggcaggaggcgtaatatgccaccgcctggcggtaatccagcacttcatcgcccgtctgttgcagtagccagatcaggtccggcgcttccagcgggtcaatctgcatgactttaagatcataaatatggcgagactctagcacatattgctgcccggtgtaggggttctcgttctgaccgagatagtcggtcagtaattcaaagggccgcacggcgggattcaccaccacagccggcagcataaaacattgcgacagccaggtggcgtaataaccacccagcgacgatcctaccagccctaatggcgcaccgccatgctcaagcacgagagattccagcaactccgccgcatcggcaggatacggcggcagctgagggacgatcatctcaacatgcggatgacgctccgccagccagttttttagctggcacgcttttgccgagcgaggggaactgttgaatccgtgcaaatagagaagcgtagacatcagtatccttccgaagcggtatcgggtcggaaccgggtatcctgcaggcgatgcacttccgtctccaggacgccgttcgcccggagctccagcgtacgccagcccggcgcgatagtatccagcgtaaagttcgcgcagtgcggtttgaactgtacgcaggttgacggcgacgccagcagacggcgaccgttccagtcaagatccagctcctggtgaatatgtccgcataacagatattttacacgcgggaaattcgccagcacgctatccagctcaccggcattacgcaagctgtgctgatccaaccaactgcaccctgccggcaacggatggtggtgcaacaggagcaatgtctgtctctctggcgcatcggcgagcttacgctcaagccattccagttggaactcgctcagttcgccatgcggaacgccaaacacctggctatccagcaacaaaatctgccattgttcaccgattaacacgcgtttagccggggaaatccccgcctcttgcagcgcgctgtacattgccggctgaaaatcatgattgcccggtagccaaacgcaaggcgcgcgaaagcttgcgataccctcagcaaaatgctgataagccgcagcggattgatcctgcgccagatcgccggtggccacgatcagatcatattcatactgttgcgcccgaatagcctccagcacggcctggtaactttcccaggtattgacgcctaacagcgtttcatgcttttcggcaaacaggtgagtatctgtaatttgtaaaatcctgactcgggcctcaccagccagaggtagggttaacaggctttccaaatggtgtccttaggtttcacgacgctaataaaccggaatcgccatcgctccatgtgctaaacagaatcgtagccagtcggccagaaactgattaatttgatgcttttcgtcgcgttgatgcaactttttatttggataatcataccgcgctttgaagcgaaagatctgctggcttgaacacacttcagccaccatcgcatcatggtagaggcgcaccgtcagcgacggcaggctccagtaggtgatggctggcgtcgtttgctcgatcgttacaagcgtagtgtatcgggtcgattccacaatcgttaaccgatattgtacgttgcccacctgatagctcaccgtttcaccgggggcgtcattgcgcggcagcaggcggcgcaattgcgaaaaattggtttcgcacaaacgcatcatttctgggaagtcaggtgtataacgcttcattttttccactcgttttttaactcttgatgatgcaactgaagccattgcaaagcgatgactgcggctgcgttgtcgattttcccctcttctacccactggtatgcctgttcccggcttaccacatgaacccgaatatcttcgttttcatccgccagaccatgaatacctaccgcggtcgtggcgtccacttcacccaccagaatagatgagcgctcgctggttcctcctggactcgccaggtaactgatgaccggtcgggtgcggcccacggtcagccctgcttcttccatcgcctcccgccgggcgaccgcctcaatggtttcgccttcttctatcatgccggcgaccatctccagcagccacggcgtaacgcttgtgtcatatgcggcaatacgaatctgttcgaccagcaccacctcgtcgcgttcagggtcaaagggtagcaagacggcggcgtgcccgcgctcaaaaatttcgcgctttacctcgccactcatttctccgttgaataaacgatggcggaatcgatacacatccaatgaaaaaaaaccgcgatagcgcgtttcccgtgcaataatttctacatcgcttttggtgaaagtaactggcaagttgtctgatttacgcattgtgctgccctgctagcaataatgattaaatgatgaatttcaagggtggttgactgctgttttatcacccttgtggtaaattggtgccaattaaggctcgtatggcacgtaacgccaactttttgcagtggcggattctgctagaatcagcaattatttttacaaattgatcagcgctaaatactgcttcacaacaaggaatgcaaatgaagaaattgctccccatccttatcggcctgagcctgtcggggttcagcacactaagccaggcagagaacctgatgcaagtttatcagcaagcacgcctgagcaacccggaattgcgtaaatccgctgccgatcgcgatgctgcattcgaaaaaattaacgaagcgcgtagtcctttactgccgcaactgggtttaggtgccgactacacctacagcaacggttatcgcgatgcgaacggtatcaactccaatgaaaccagcgcttctctgcaattaacgcagacgctatttgatatgtcgaaatggcgtgggctcaccctgcaagaaaaagcagcaggcattcaggatgtcacctatcagaccgatcagcagacgctgatcctcaataccgcgaacgcgtattttaaggtattgaacgctattgatgtgctttcctatacccaggcgcaaaaagaggctatctaccgtcagttagatcaaacgacgcaacgttttaacgtgggtctggtcgccattaccgacgtgcaaaacgcccgtgcgcaatatgataccgtactggcgaatgaagtgaccgcccgcaacaacctggataacgcggtagaagagctgcgccaggtaaccggcaattattacccggagctggcgtcgcttaacgtcgagcattttaaaaccgacaaacccaaagctgttaatgcgctgttgaaggaagcggaaaaccgtaacctgtcgctgttgcaggcgcgtttaagtcaggatctggcgcgcgagcaaatccgtcaggcgcaggatggtcacctgccgacgctgaatttaacggcctcaaccggcatttctgatacctcttatagcggttctaaaaccaactccacccagtacgacgatagcaacatggggcagaataaaatcggccttaacttctccctgccgctgtatcaaggtgggatggttaactcgcaggtaaaacaggcgcagtataacttcgtcggcgcaagcgaacagctggaaagcgcgcaccgtagcgtggtgcagaccgtacgttcttcctttaacaatattaacgcctccatcagcagcatcaacgcgtataaacaggcggtcgtttccgcgcaaagttctttggatgccatggaagccggttactcggtcggtacacgtaccattgttgacgtactggatgccaccaccactctgtatgatgccaagcagcaactggccaacgcgcgttatacctatttgattaatcagttaaatatcaaatatgcgctcggtacgctgaacgagcaggatctgctcgcgcttaacagtacgttgggtaaacctatcccgacgtcgccggaaagcgtagcgccggaaacgccagatcaggatgctgccgcagacggttataatgctcatagcgccgcgccagcagtacagccgaccgccgctcgcgccaacagcaataacggcaatccattccggcattgataagttattcgctggcgctgcgcttatcagacctgtgcccttgtaggtctggtaagcgcggcgctacctgtcataaagccgcgcctgaacgtaagacaacgtaaagatcctgctattccgccgcattctcgccttttctcgcttcaatttcgaccagtcatcctctattctgaaggcatgttgtatttaccactgggtcctggaagacaaatatgaaacggacaaaatccatccatcacgcatcatttcgcaaaagctggagcgcgcggcatttaacgccggtcgccctggcggttacggctgtttttatgctggctggctgtgaaaaaagcgatgaaaccgtatcgctgtatcaaaacgctgatgactgttcagcggcgaatccgggcaaaagcgcggagtgtacaaccgcgtataacaatgcgctgaaagaggccgaacgtactgcgcctaagtacgctacacgcgaagattgcgtcgctgagtttggcgaaggtcagtgccagcaagcgcctgcacaggctggcatggcgccggaaaatcaggcgcaggcccaacaatccagcggcagtttctggatgccgcttatggcaggttacatgatggggcgtctgatgggcggcggcgcaggctttgcgcaacagccgctgtttagctcgaaaaacccggccagccctgcatacggcaaatataccgatgcggcaggtaaaaactacggcgcggcgcaaccgggccggacaatgaccgtaccgaaaaccgcgatggcgccgaaacctgccaccacaacaaccgttacccgcggcggttttggcgaatccgtcgccaaacagagcaccatgcagcgtagcgctgccggtacttcaacacgttcgatgggcggctgatacgcatggaaagagtcagtattaccgagcgcccggactggcgcgataaagcgactgaatacgggtttaattttcacactatgtatggtgaaccgtactggtgtgaagacgcttattacaagttaacgctcgcccaggtggaaaaactggaagacgttaccgccgagttgcaccagatgtgcctcaaggtagtagaacgcgtcatcgccagcgatgagctgatgacgaagtttcgtattccaaaacatacctggggttttgttcgtcagtcctggcaaacgcaacaaccgtcgctctattcccgcctcgatctggcctgggacggcatcggcgagcctaagctgctcgaaaataatgccgacacgccaacgtcgctgtatgaagcggcgtttttccagtggatttggctggaagatcagatcaacgcgggcaatctgccggaaggcagcgatcagtttaatagcctgcaggaaaagctgattgaacgctttgctgaacttcgcgaacagtacggttttcagttgctgcatctcacctgctgtcgcgatacggttgaggatcgcggcaccattcagtatttacaggactgcgcggccgaagcggaaatcgccaccgaatttctctatatcgacgatattggtctgggggaaaaaggccaatttacggatctgcaggatcaggtcattgcgaacctgttcaagctctatccgtgggaatttatgctgcgcgagatgttttccaccaagctggaagatgccggcgtgcgctggctggaaccggcctggaaaagcattatctccaataaagcgttgttgccgctgttgtgggagatgttccctgaccatccgaatctgttgcctgcgtatttcgccgaagacgaacatccgccaatggataaatatgtcgtgaaaccgatcttctcccgcgaaggggcgaacgtatcgattattgagaacggtaaaacgatcgaatccgtggaaggcccgtatggcgaagagggtatgatcgtgcaacagttctatccgctgccaaaattcggcgacagttacaccctgattggtagctggctgattaacgatcagcccgccggaattggtatccgtgaagatcgggcgctgatcacccaggatctctcccgcttctatccgcatatttttgtcgaaggatagattctcctgtaagcccgatgcgcgtagcgccatcgggcaatcattcagcgccttatccggcctaccccacctgcaccgacaacatacttatactgcccatctcaataccgtcgaccgggatggtgataggttccttgccgtcccaggcgccaagtacatacagcaaaggcaaaaagtgctccggcgtcgggttcgataaggcgcccccttcatgttgcagataattcaccagcgggtgctgttctaccggcccctgccacgtcagattggctttcacaaagtcattaaatgacgccgcccagggatacggtatattgtcaccgtgccaacgcacagtccgcagattatgaactacattcccgctggccaccagcatcacgccttcgtcacgcagcgtcgccagcttacgacccacctcaaaatgccatgccgccggtttggtactatcaacactaagctgcaccatcgggatatccgcattcgggtacatcttgatcaatacgccccaggagccgtgatcaaatccccacgcttctttatcgagcgcgacgggaacgggagccaacagttcaaccagacgctgcgccagcgcaggcgatccaggggccggataatgcgtgtcatacagcgcctgcggaaaaccgccaaaatcatggagagtttgcggcctttccatcgctgtgacgccagtcccacgggtataccagtgcgccgacaccaccactatcgcctgtggtcgcggtagggcttcccccaatcgccgccaggcgcgggtataatcgttatcgtccagcacgttcatcgggctgccatgccccaaaaacaatgctggcatacacgttaaagacatgatgttatccttactggaaagacattttgttaacatcaccatacgctttcttcacagaggaagaactcagataaccatgatgaagatcatcagttattttgaaggtcaggttcggacggcaaattgataaggagtaatggatgtcagtaccacttattctgaccttactggcgggcgccgccacctttattggcgcgtttcttggcgttctcggccaaaaaccgtctaaccgcgtgctggctttttcgctgggcttcgccgcagggatcatgctgcttatctcgctgatggagatgctgcccgccgcgcttgataccgaggggatgtcgcctgtactgggctacggaatgtttattatcggcctgttgggctacttcgggctggaccgcctgcttcctcacgctcatccgcaggatctggtgcaaaaaaggcagcagccgcttcccggctcgataaaacgcactgcgattttattgacgctcggcattagcctgcacaactttccggaagggatcgccacctttgtcactgccagcagcaatcttgaactgggtttcggcatcgcactggcggtggcgttgcacaatattcctgaaggtctggcggttgccggcccggtttatgccgcgacgggctcaaaacgtaccgcgattttttgggccggtatctccggcatggcggaaattcttggcggcgtgctggcgtggctgattttgggcagcctggtttcaccgatcgttatggcggctatcatggcggcagtcgccggcattatggtggcgctctccgtcgatgaactgatgccgctggcaaaagagatcgatcctaacaataaccccagctatggcgtgctttgcggtatgtccatcatggggctcagtctcgtcattttgcagacgataggtatcggttaagagaaacgtcgcgccggatgcaggcctttagccaggcaacatccggctgcccgtcaaggatatgcgctatttctgctcattcatcacgctgtcgccttcgctcgtctggcgaaaacgtttcgttcgcgcttcaagtaatgcatctctgtcttgccgaaacgctctgcaataacgcttcatatggcaaatataccctactaccaccagaacgattaatattatccaataccaggcaataaacatcctttttacccttaaaatttaacatcactaaacatttaacgttaaaattttacatacccttattttgacgtattcatatactggcatatttgtggaacaaataaatgattttgatcatataaatcagtggtgaaacacaataatgaaagaggtattaagcagaaaacaatgtcgataagatcacacttcgtactaatttatattgttcttaaaatatcacactcctactatcgactcactcaggcaattaaaaaatattgatacagaatatactttaaaataagtaacagcatcatgacttatatttaaagaccaatcatttacctcatttattattcataaaaacatagtatattcagaagtattatatttagaagttgtatataaggagatatatccatgtttgaccaataccggaaaacaatacttgccggtgccgtcgcactgacatgcggactcaccgcagccagtacgtttgccgcaggttttcaaccggcacagcccgcaggaaaattaggcgcagtcgttgtcgatccttacggaaatgcccctctcaccgcgctggtggaattagatagccatattatttcagacgttaaagttactgtacatggcaaaggggaaaaaggcgttcctgttacttataccgttgggaaagagtctttagaaacctatgacggtattcctatttttggcctttatcagaaatttgccaacaacgtcacggtagaatataaagaaaacggcaaagccatgaaggatgactatgtggtgcagacgtccgccatcgtcaaccattatatggataaccgttctatttcagatctccagcaaacgaaagttattaaagttgcgccaggatttgaagatcgcctttatctggtaaatacccatacctttacgccgcagggcgctgaatttcactggcacggcgaaaaagataaaaatgcgggcattcttgatgccggcccggcgggcggggctttgcctttcgatatcgccccttatacgtttgtggtcgacacccagggtgaatatcgctggtggctggatcaagataccttctacgacggccacgatatgaatatcaacaaacgcggctacctgatgggtattcgtgaaacgcctcgcggcacctttaccgcggtgcagggccaacactggtacgagtttgacatgatggggcaaattcttgccgatcataaactgccgcgcgggttcctggatgcgtctcatgaatccatcgaaaccgtgaacggcaccgtactgctgcgcgtcggcaaacgagattaccgcaaagaagacggcatacatgttcatactattcgtgaccaaatcattgaggtcgataagtctggccgcgtagtagacgtttgggatttaaccaaaatcctcgaccctatgcgtgatgcgctgctcggcgcgctggatgcgggcgcagtatgcgtgaacgtcgatctggcccatgccggacagcaggcgaaacttgaaccggatacgccgtatggcgatgcgcttggcgttggtgccggtcgtaactgggcgcacgtcaactctatcgcttatgacgcgaaagacgactccatcatcctttcttcccgccatcagggtattgtaaaaattggtcgcgataagcaggtgaaatggatactggcaccgtctaaaggctggaataagcagctagccagtaaattgctgaaaccggtagacgatcatggtaagccgttgacctgtgacgaaaacggcaagtgtaaggacaccgatttcgatttcacctatacccaacatacggcatggctttccagcaaaggcacgttaacggtctttgataacggcgatggtcgcggcctggagcaaccggctctaccgaccatgaaatattcccgttttgtcgaatataagatcgatgagaagaaaggcaccgtacaacaagtttgggaatacggtaaagaacgtggatatgatttctatagtcctattacctcggttgttgaatatcaaaaagaccgcgacaccatgttcggctttggcggttctattaacctgttcgacgttggtaaacccacagtcggcaaactgaatgagattgactataaaacgaaagaagtgaaagttgaaattgatgtgctgtcggataaacccaaccagactcactatcgtgcattactggttcatccaacgcaaatgtttaaataaataacgggaaggaattaatatgtcatctaaatggattacctctttatttaaaagcgtagtattaaccgcagcattggtcactccttttgcggcatcggcttttaccgagggcacagattatatggttctggagaaaccgattcctaatgcggataaaacgctgattaaggtatttagctacgcctgccctttctgctacaaatatgacaaagccgtaacaggtccggtttctgataaagtagccgatctcgttacgttcactccgttccacctggaaacaaaaggcgaatatggcaaacaggccagcgaagtatttgcagtcctgatcgccaaagataaagctgccgggatttcgttatttgatgctaaatcacaattcaaaaaagcgaagttcgcctggtatgcggcttaccatgataagaaagagcgctggtcagatgggaaagatccggcggcatttattaaaaccgggctggacgccgcaggcatgagccaggctgattttgaagcggcgctgaaagatcctgccgttcaggagacgctggaaaaatggaaagccgcctatgacgttgccaaaattcagggtgttccggcttacgtcgtcaacggcaagtaccttatctataccaaaaacatcaaatccatcgattctatggctgaactcgttcgggaactggccactaaaaaataagcagggaaacgattatggattttattaagggattatggcgagacctacgcgcaagaccagtggatacgctggtgagatggcaggaacagcgctttctgtggctgttaatggccatcgcgatgggaggattaattatcctggcgcactcgttcttccaaatctacctctacatggcaccgtgcgagcagtgtgtttacatccgttacgcgatgtttgtgatggtaattggcggggtgattgcggcgataaatcccaaaaatatcgtgctgaagctgattggctgcatcgcggcgttttatggcagcattatgggcattaagttttctattaagcttaatggtatccatcatgcggtacataatgcggaccccgattcactttttggcgtgcaaggatgttcgactgacccgacctttcctttcaacttaccgttggcggaatgggcaccggagtggtttaaacctaccggagactgcggttatgacgcgcctatcgtccctgatggcgtaacgctcagtagcgtacagcagtggtttgtcgatctctaccagcagtccgaaggctggtatctgcttccgccctggcactttatgaacatggcgcaggcatgtatgttggcctttgggttgtgcctgattctgctgctggtgatgagcggcgcctgggcattgaaactggccagaggcaaataacctgaatagataaaccaaagcagaggtctgcattcaggcctctgcttttctcacaataattttaccattcagcttattcgtcgttctttgaaactgaacgatatggcaccgaaggaatacaaaaaagccgatgacatctcatcggcttttttcaaccatgatccgttcgatcagctggctttgcgctcatgcgcctggcggtaagccaccagatcttcaatcgtgactaccgccatattatgctggcctgcaaacgcgatacactccggcgcgcgcgccatcgtcccatcgtcgttagtcaactcgcacagtacacctgcaggtttaaaaccggccagcgtcatcagatcgatggtcgcctccgtatgaccgccgcgcgtcagcacgccgcccgcctgagcgcgcagtgggaaaacgtgccccggacggttaagatcggacggttttgcgccatccttaattgccgcacgcaccgtagtgacacggtcagcggcggaaacgccggtggtcacgccttctgcggcttcaatggtcacggtaaaaccggtgccgtaggcgctggtgttgttttccaccatcattggcaagtcgagctgcttacgacggtcttcagtaatacacaggcaaacaataccgctaccgtgacgaatggttaacgccatctgttctacggtcatcgtctctgcggggaaaatcatatcgccttcgttttcacgatcttcatcatcaagcaccatcacaccgcgtccttcacgcagcgcatccagtgcaagttcaacacgttcaaaaggcgtaccaaaagaggaaagtagcgtctgattcatggtaaaaaaacctcattaatattatggttaccagaatcagggcagtcttaggagtgccgacaagcggcaaaaaaataacgtgagcgggtccatgcccgactggatcgttaccctctcccatccggactttaaccgtcggccccggaattacaccggatctgctgaccttttcgctatggcaaaaagcgctcgcgggctttcaacctgctctccgcgttccgtcacggcgcgccgtgatgagaaatgcgttaaacatcgctgatttaccgccggtggggaatttcgccccgccctgagaataagcgggttaactataacgctattgattaccttcatcaacgcctttactccgtatgacgtcacacaattctggtttatggcgtccacatatcgcactacaataagagctaacacttaccagttcagggaaaccacaatgattgacccgaaaaaaattgagcaaatcgcacgccaggttcatgagtcaatgccgaaaggtattcgcgagttcggggaagatatcgagaaaaaaatccgtcaaacgctgcaatctcagctgacgcgtctcgatctggtgagccgcgaagagtttgatgtccagactcaggtcttgctgcgcacccgggaaaaactggcgctgctggagcaacgcctcagcgaactggaagctcgcgacaagcctgaagaagtaaaacctgcgcccgccattccgccagtcgatccacaacaagagtaaaaacgtgaacgggcctgacggcccgctcatataagatctgaataatgccctgcacctgtaaagggagcctgcattagtgttctaattctaaccttttcgcctgagtcgcctgctggcagtaaagcgcgtaacgcttgcaaaaccagtcgcgatgctcctcgtccatattgccggttaccgcctggatatcaacaggacgcccctccgcctgcattctggcaaaactgcgcgccagaaaatcgaaattatttaatgaatagacgttattgttgttcatcagcataccctccagttattgaattctgttaaggctatatgctttttctgatttcagtatttccctatatgtacggcggttttatacataacgtgcgcaaatttaatgcgcaaaatcacaatattcaccaaagataacgacggataaatcgcttttcggacttaaggagatatgggtcacatgatattgtaacgcaatgaaataacaagcatgaaaattatcacgcgaacatccttctgaaggcggcgacaaggatagaaaatatgaccttatttgcggagtataacagcccctatctgtttgccatcgcgttcgttttctttatcggcgtgctggagatgatttcgctgatttttggccactttctttcaggcgcgctcgacgcccatctcgatcattatgacgccctgtcatccggccctgcgggccaggcgcttcattatctgaatattggacgcgttcccgccctggtcgtcctctgtctattggccggttatttcggcctcttcggtatcctcatccagcatggcgggatcatgctctggcaagcgccgctcagcaatctgctgctggtcccgttgagcattgtcctgtcggtctttgccgtgcattacagcggaaaaatcctcgcgccctggctacccagagatgaaagctccgccctccgggaagaggaatttatcggcggcatggcgattattaccggccacgccgccgtcgccggtacaccttgcgaaggaaaatttaccgataagttcggccagattcactatttactgctggaacccgaaaagggaaaagaatttaaaaaaggagacaaggtgctgattgtctgccgactttccgcaacgcgttatttggctgagcgtaccttctatgtttaattgagaggaacttacataatggatgatgtttttggcatattgccatcatggatgtttaccgccatcgttgcggttatcgtcttactaattatcgggatcatttttgctcgcctctatcgccgcgcatctgcggaacaggcatttgtccgtaccgggcttggcgggcaaaaagtggtgatgagcggcggcgctattgtgatgccaatctttcacgaaattattccgatcaatatgaataccctaaaacttgaagtcagccgtgctaccgtcgacagcctgatcaccaaagatcgtatgcgcgttgacgtggtcgtcgctttcttcgtacgtgtaaaaccctctgttgaaggtattgccaccgccgcacaaacgcttggccagcgaacgctgtcgccggaagatctgcgtatgctggttgaggataaattcgttgacgccttacgcgctaccgcggcccagatgacgatgcatgagctacaggatacgcgtgaaaacttcgttcagggcgtacaaaacaccgttgcggaagatttgtcgaaaaacggcctggagctggaaagtgtctcattaaccaactttaaccaaacgtccaaagagcatttcaatccaaacaatgcctttgatgccgaaggtctgacgaaactgacgcaggaaaccgaacgccgccgtcgtgaacgtaatgaagtggaacaggatgtggaagtggcggtgcgcgaaaagaaccgcgacgcgcttgagcgcaagctggaaatcgagcaacaagaagcctttatgactctggagcaggagcaacaggttaaaacccgcaccgccgaacaaaacgctaaaattgccgcttttgaggccgagcgccatcgtgaagcagaacagacgcgcattcttgctgagcggcagatccaggagacggagatcgaacgtgagcaagcagtacggtccaggaaagttgaggccgagcgtgaagtacgtattaaagagatcgaacagcaacaggtgacagaaatcgccaaccagacgaaatctatcgccattgccgccaaatccgagcagcaatcgcaagcggaagcgcgcgccaacgacgcgctggccgatgcggttcgcgcccagcaaaacgtagaaaccacccgccagaccgccgaagcggatcgcgccaagcaggtcgctctgatcgccgcggcgcaggatgcggaaaccaaagcggtcgaactgaccgttcgggcaaaagcagagaaagaagcggcagaattgcaagccgccgctatcatcgaactggcggaagcaacgcgtaaaaaaggtctggcggaagccgaagcgcaacgggcgctgaatgacgctatcaacgtactatctgacgaacaaaccagcctcaaatttaaactagcgctcttacaatcgttgcctgctgttattgagaagtctgttgaaccgatgaaatccatcgacggcattaagattattcaggtcgatggcctcaatcgcggcgcgacggcgggcgacgtcgccgctggcggcgctaacgggggaaacctggcggaacaagcgttatctgccgcgctcacctatcgtacccaggcaccgctgatcgattcgctgttaaacgagattggcatcgctggcggctcgctaaaggcgctgaccacgccgttggtttcatcggcaacggatgagattaatcgcgaagcaacgataaaagagcaataaccccccgccatatctcctgtccctggtcataagaccggggatttttttatcttttttccaccttgtctgtacaaagcgttatgaccagcaggccattttgcgtgggcgatccagtaacgcaaaatcggcgggagaaagcccttgcgccagacaggccactcaccaacaatcgcgatgtcagcaaggggctgaaacgggaaagcccctcccgaggaaggggctttaataaggaaagggttatgatgcaccaggtcatcatactgattgttctgttactgataagtttcgcagcttactaacagacaatcagagggggggagagatcccctctcacccttattcctttactttaggtcgaaaaaaaagcagcgtcaaccgcgagatacgcgtcgaaacaaaatgtccgacgcgccttcaaaatcagcgcccgccgcgtctgtaacgcctgatgacgcggttttacttctcgctctcggtctggatctttttgatgatattggtcgtggaacaaccatcttcgaagttcagcaccatgacttcaccgccgttggcccagacctcttcgctgcccgcgatctcttccggcttatagtcgccgccttttaccagcagatccggcagaataccggcaatcagtcgttgcggcgtatcctcttcaaaagagacaacccagtcgaccgactccagcgcgcctagcacgatcatacgctgttcgagcggattaaccggacggctttcgcccttcaggcgtttagtcgaggcgtcactattgaccgcaacaatcaggcggtcgcccagtttgcgcgcgttcgccagataagagacatggcccgcgtgcagaatatcgaaaacgccgttggtcatgaccactttctcgccacgcttacgcgcgctggcgacggcctgtctcaactcctcttcggtcataacgccgaagccggtatccgcgcgtccgcgcactgcgttttccagctcaataggggaaaccgttgacgtcccgagtttacctaccactacgcccgccgccgcattggcgaaataacacgcctcttccagggtatttcccgccgccagcgtcgccgccagcacgccgatcaccgtatcgcccgcaccggtaacatcataaacttcctgcgcctgcgtcggcatatgtagcggcgctttattcggttgcagcagcgtcattccctgttcggaacgcgtgaccaacagcgcggaaaggtcgtaatcagcaatgagtttcatgccgcgttcaaccagttcgtcttcgcttttacatttccccgcgaccgcctcaaattcagaaaggtttggcgtcagcagcgtggcgccgcggtaacgttcaaaatccgttcctttcggatcgatgagcaccggcacgcccgcctggcgcgccagggaaatcatagtctgcacgctggtcagagcgcctttggcataatcggacaataccagcgcgccgatcgatcccagcgcctggttgatacgctcatgcaacggctgcgggtccacgccctcaaagccttcttcaaaatcaagacgaatgagctgctgattacgtgatagtacgcgcagtttggtaatcgtcggatgcgtcggcacagaaacgaagtcgcacttcacattgacctccgccagcgttttgctcagcgcgcgcgcggcgtcatcaatacccgtcaggccgaccagacgggcgttcgctcccagagacgcaatgttcatcgccacgttcgccgcgccgcccgggcgttcctcaacggtatttaccttaaccacgggcaccggcgcttccggtgaaatacggcaagtggggccataccaatagcgatccagcattacatcacccacaaccatgacgcctgcacgttcaaacgctggcagatttactttcattcctgtctcctgagagattcaaaatttgcgcgcgataatagcataattcaaacggctaccagccacttccgccagcttgcctgcaccagcgcgcgctctttgctaaaacacgtctgcgccacatgaccgggaagctcctgcaacgccaggtggtgcagttcatcacgcagtgtggtgtaggctaccgtcagcgcctgcgcctcgtgttcatccataatgccgttttgcgccagaagctccaggatgcgcacgttatcagaccagcgcgttaatttaggtttttcatgagcgtagcgcagtaccagatattgcgcgataaactcaatatccgtaataccgccttcatcagctttaatatcaaaacgatcacgatgcttattgccgagatgcgcccgcattttctcgcgcatttcacgcacttcagtctgcaatgtcttgccgtcgcgcgccgtcgtcatgatagtgcggcgcaccgcatcaaactgtgaggtaagctgcgggtcgccatataccacgcgagcgcgtaccaatgcctgatgttcccaggtccaggcttcatgctgctgataatcggcaaacgcgtccgctgaagtcaccagcattcccgccgcgccagaggggcgtagacgcgcatccacctcatacaaaatgccggaggaagtgcgcgtactgaacagatgcataatgcgctgcgccaggcgcagataaaactgccgcccgtcgatttcgcgttcgccgttggtcatgacgtccatcggacagtcatgcaggaagatgagatccagatcggaactgtagcccagctcccatccgcccaacttgccataaccgacaaccgcaaacccccgcccctggcgctcgtccagatgcgctggctgaccataacgcgcaaccatttgcgtccacgcctgctgcaccacagcatcaatcatcgcctccgccagccatgtgaggtgatcgcttactttcatcaccggcagcgtaccggcaatatccgccgccgcaatccgcaaaagctgtgcctgtttaaactggcgtaatgcctccagttgttgttcttcgtcctcttccggcacgcgcagcaaatattggcgtaattcgtcgcggtaagcgtcggtagccgtcggctgataaagcgtgccggggtcgagcagttcatcaagcaacaacggataacgcgccaattggctcgctatcattggcgaagcggcgcagagcataatcaggtgtttcagcgcgccgggaaattcgctcagcagctccagataggtggtgcgagtgacaatccccgccagcaacggcgttatccgcgatagcgtaacagcggcgtcttcgcgagaacagacatcagcaagcaggtgcggcatcagttggtccagcacttgccgcccgcgcgggccgatagggcgtttatccagttccttacggaagtcagcgatgagggtcagaacctgtcgccgctcctcatcggctaaatgcgccagcactggcgtcgaatcatcctcctgtagcgcatcctgccatacttcacgccacggctctgaacgttcttcctcctgcggggtatcggcttcatcatcgccaattaattcgttgaatacgcggcgtacattagccatatgatccgtcagttcaccaacaagctgcggccagttctccgccttcattccccaggccagccgcgcccgattcagatcgtcggcaggcaacgtttgcgtctgttcgtcattgatgctttgcagcagattctccagacgacgtagaaaaagataggccacgcgcagttgcgccacgtcattctcaggcagcaaatgcagcgcagcgatagcatccagcgtcggcagtaacgaacgcgactgtagcgacggctcgcgtccgccgcggatgagctggaatacctgcacgataaactcaatttcacgaataccgcccgcgccaagtttaatgttgtctttcaaaccgcggcgtcgcacttcgcgggcgatcatccctttcatattacgtagcgactggatgacgctgaaatcgatatagcggcggaaaacgaaaggccgcagcatggcgcgtaattcacgagaccaggcgtcgtcgttatcgcccattagccgcgctttcaccatggcgtagcgttcccagtcgcgtccttgctcctgatagtaatcctccagcgcggcaaaactcagtaccagcgggccgctgtcgccaaacggtcgcaggcgcatgtccacccgatagacaaaaccgtccattgtgggctgatccagcgctttgatcagccgctgcccgagacgcgtaaaaaactgggcgttatcgagttcacgacgcccgccccgggtctcgccatgttccggccaggcgaaaatcagatcgatatcagacgaaaaattcagttcgccgccgcccagcttgcccatgcctaaaatcaacagcggctgcggaacgccctgcgggttacagggggttccccattcgcggcaacaggcggcatacagccagtcgcgcgcccccacaatgagcgtctccgccagatggctcaactgttgtaaaatagtctcatcgtccaccagcgacagcgtctgtgcccaggcgatgcgtaccatgatgcgacgacgaaaaaacctcagttcacgcatcagcgaggcgtcgtcacagacacctgccaacgcctcctgtaaccagccagcataatgtcgccattcatcagcctgcggcgatgcggattccagttcggcaagccactccggatgcgctatcacgctatccagcgcaaaatcgctaaatgtaagtactgacttcgcctgcacgctaagcgatgtctcagtaaatccttctggtaggcgctcaacaacggtctgccagtactgcgataagggtgaagagagcggcgtcatttaggggatatcctttaaataatgccgggtggcggcgtttcgcctgatccggcctacaagtccgcataccgtaagcctgataagcgcagcgtcatcaggcgctttctacggttctgattatcgttttccgctgtgcaaccagaacggctgctggttgatggcctcattacggaaatgttcaatttcaatacgttgcccggtaataatggcgtgacgcaatccctgccagttctccagccatgcctgcgcgaccatcgcatcataatacccggccagcagtaaaacgctgtcaatatcgcgagtcaaacgcggcaactggtcgcgatatttatcacccagcggttgtccaaaaactttttttaattcagcagcatgacgagaaagatgaatgtcggcgaaacgcttaaaagaatcggccattttggcctgcgccttcgcgtccagaaatggctgccaggctttcgtcaccagccattccgtcaatgccagtttcgccatcgccgtttgcgtactataaacggctgtgacggcggacaccgcggatgtcatcgtcgcttccgcctgggtaagtagatcacgtaagtgagcgctcgctttacgcggaacaatgccaccaaagagcattaaggcatggcgcaccaaccccatagcatccagcacgtgttctttcgccgacttgtcgccacgcagccagagctcttcatggtactgccactgtgacaacgccagatccagcgaggcctccagcccttgctctaccgtggctttcgcggcggtccgcagaattgtcgttggtgtattctctcgcggcgcattcccctgcgccaggtgataacctcgcgccgccttactcagactgccctgacgcaaaccggtttgcgacagcagttgcttcgccagttttaacacggcgcgcgtatcgccgcgaagcaactcaagctccagctcacaaatcggttcggcaaactcgcccgcttttacgtcgccgagatcgagcgcaatttcaatcctgctgccgtcaacgtccagacaccatttttcccggtaaaaatcggtactgaacagcggctgtacgcttgatgccaggccggcgggcaggttgccatccggccagacctccgccggaagttgcgtcagatccagcacgggttcgcttagcgcgacattgtattcgggtcgctggtgcagcccccccgttacccggccggcaattttcatggtcatttcatagcgcccattttcaccacgaatacgcagccccatatcatggcggcgtagccagttatcaggcgtttcgaagtagatattcagcaactggctgggcgcatgatgctcgccgccgagcgtatgaagatgatttcgcagcgcatctacggcgtcgtgattgacgataaactttaattcgatttcctgagccatggccttgtacttatgggttatgtcacatctgggaagattcttggcgaacttacccgcattatttttgtcagtagatagtattttgcgccaaattgccatgcaacgagcaatttgacgggcgtaaaagtttgacgtagcggcaaaggcgacacagatgattccgattgatgtcgactactttgcgtagcgacactgatgccgttactatcgttccactttctctgacaataacgacagcctgatgccaaaattacgcctgattggactaactttacttgcgcttagcgccaccgccgtctctcatgctgaagagacgcgttacgtttctgatgaactgaatacctgggtccgcagcggtccgggagataattatcgccttgtgggtaccgtcaacgccggcgaggaagtcacgctcttacagagcgatgccaactatggtcaaatcaaagacagttctggtcgtactgcctggataccgttaaaagaactgaataccacgccaagcctgcgtacccgcgtgccggatctggaaaatcaggtcaaaacgttgactgataaactcaacaatattgataccacgtggaatcagcgcaccgccgatatgcagcagaaagtggcgcaaagcgacagcgtcatcaacgggctaaaagaagagaaccagaagctgaaaaacgagctgattgtcgcgcagaaaaaagttagcgccgcgaatctgcaactggatgacaaacagcgcaccattattatgcagtggtttatgtatggcggcggcgtattgggtattggcttgctgttagggctggtgctgccgcatatgatcccaagccgtaaacgcaaagaccgctggatgaactaaatcgccttctctgcggcactgtcttatcattagaggatgatcgtttttaaaaggaaagtggcgtgaagatttatctggtcggtggtgcggttcgggatgcgttgttagggctaccggttaaagataaagattgggtcgttgtcggcgccacgccgcaggagatgcttgatgcgggctaccagcaggtaggccgtgattttcctgtgtttctccatccgcaaactcacgaagaatacgcgctggcgcgtactgagcgtaaatccggttccggctacacgggcttcacctgttatgccgcgccggacgttaccctggaagccgatctccagcgtcgcgatctgaccattaatgctctggcgcgcgacgatgccggccagattatcgacccttaccacgggcgccgggatctggaggcacgtctactgcgccatgtctctcccgcgtttggcgaagatcccttgcgcgtattgcgcgtggcgcgttttgctgcccgttacgctcatcttagtttccgtatcgccgatgaaacactggcgctaatgcgcgaaatgaccgcggcaggcgagctggaacatctgacgccggaacgggtatggaaagagacggaaaatgcgcttaccacccgcaatccgcaggtttacttccaggtattgcgcgactgcggcgccctgcgcgtcctgtttccggaaatcgacgccctgtttggcgtacccgcgccggcaaagtggcatccggaaattgataccggagttcatacgttgatgacgctgtcgatggccgccatgctcagtccgcagcttgatgtccgtttcgccacgctttgtcatgatctgggcaaaggcttaacgccgaaaaacctctggccgcgccatcatggccacggcccggcgggcgtgaaactggtcgaacagttatgccagcgtttgcgcgtccccaatgacctgcgtgatttagctaaactggtcgccgaataccatgatctgatccacacctttccgatactccagccgaaaacgatcgttaagctgtttgacgccattgatgcatggcgtaaaccgcagcgcgtcgagcagattgcgctgaccagcgaagccgatgtccgtggacgtaccggatttgaagcgtcggattacccgcaggggcgctggctgcgcgaagcctggcaggtggcccaagcggtaccgacgaaagaggtggtggaggccggatttaagggcattgagattcgcgaggagctgacgaagcgacgaattgcagcggtcgccaactggaaagagaagcgctgcccgaaccccgccagctaaacgccatccggcacgataaattgcctgatggcgctgcgcttatcagaccgacaaaacagttaggccggacaaggcggtactccgccatccggcacggtcaatcatcagaagaagacaacgtaaacggcagccgccaccacaaagcggtaaatcgcaaacggaataaacgagatacgcttaatcagttgcaggaaggtcttgatagcgatcagcgccaccacaaacgccgtcacaaagcccaccgcgaacattggaatatccgctgcggtcaggaatgaccaacttttgtagagatccagaaccgttgcgcccatcatcatcggcacagccagtaagaacgagaactcagaggcggcgtaacggctgacgcccatcagcatcccaccggaaatggtcgctccggaacgcgagaagcccggccacagcgccagacactggaaacagccaatcataaacgcctgacgatacgtcatatcatccagccccggcgcgcgcggttctttcggcttcaggcactcggcggcaatcagcaacagaccgcctaccaccagcgcgtacatcacgttaattgggttaaatagcgacttgatcgtgtcatgaaagactaaccccagcaccaccgccggaatcatgcccagcaggatgtgaatcaacgttaatcgacctttactttcaccttcacgctgtagcgggcggccaaagtgaataccgatgagaccaaacaaccgccgccagaacatcaccacgaccgccagaatagatccaagttgaatcaccacttcgaatgtcttggccgtatcgccttcaaaccccagcagatgacccacaataatcatatggcccgtgctggataccggcaaaaactccgtcaatccttcgaccacacccaaaattgccgctatcagcagcgagtgcatatcgctcatcaataaacccctaaaatgaaaaacactgcaaaaatggatctcgcgttaagaccccatatataaccgtttggtttaaaaaatataaaattatttatttttatttcagattattgccacgctcaataattacccctacgttcgccgcgcgcgcgacggcgccaggcttactcagtttgatgcgaacccacggagaattgaatcggctaagcagcagatccgccacctcttccgccacacgctcgaccagagcaaaacgcccgccttcaacatgatttatcaccgtgtcggcgatatccgcgtaacttagacaatctgcgacatcatcgcttttcgccgacttgcggttatcccatgccatttcgatatcgaacaccagtttttgctcgatagtctgttcccagtcgtaaacaccgatagtggtgattaccgaaagttgctctataaatacaatatccatcacgacctgcctgctttttggctaacccggataccacttccggcgaaatgtgcgtattatccacagaaatagtaaataaaacgacactttcaatacggaacagcttatgagtgcaatcgcgcctggaatgatcctcttcgcgtacctctgcggctcaatttccagtgccattctggtttgccgcatcgccgggctgcccgatccgcgagaaagcggctccggcaacccgggcgcgacgaacgtattacgaatcggtggcaagggagcggctgtcgcggtacttatttttgacatccttaaaggtatgttgcccgtctggggcgcgtatgcgttaggcgttacccctttctggctggggcttatcgctatcgccgcctgtctggggcatatctggccggtcttttttggctttaaaggtgggaaaggcgtagcaaccgcgtttggcgccatcgcgcccatcggctgggatttaaccggcgtcatggcaggcacctggctgctgacggtcctgttaagcggttattcatcgttaggggcgattgtcagcgccttgattgcgccgttttacgtctggtggtttaaaccgcagttcaccttcccggtatcgatgctgtcatgtctcattttgctgcgccatcatgacaacatccagcgtctgtggcgtcgccaggagacgaaaatctggacgaagctgaaaaagaaacgccagaaagattgagctggagctgcgtctggaagagggccgcaaccgtctggggatcggcccacaagggttgaccggcaatagctcggttgatgggcttacatatcgaatccgccgcgcgtcacccttccaccattggcgtggttaggcgcgattttcggcctgatcttcctggtgctgctgatcgtctccaggctgttgtggatgcccgtcgttttgctgtaaacccgttggggcggcatgatgtcgccccctttctccgcttttacgccgccggcagctcggccagcggccagcgcggacgtaccgttacgccaagatccgccgtaacgcccgccttaaaccgcaccattccggcataggcgatcatcgccccgttgtcggtacaaaactccggacgcgcatagaacacttcgccgcggcgtttttgcatcatttcggcaagcttcgcgcgcagcgtgcggttagcgctgacgccgcccgccatgaccagacgcttaaaaccggtgctttccagcgcgcgcttgcacttgatcatcagcgtatccacgaccgcatcttcaaaagcgcgcgcgatatcagcgcgagtttgttcgtcgccgccattactacgaatggtgttagcggcaaaggttttcagaccggaaaaactaaaatccagccccggacgatcggtcatcgggcgcggaaagacaaaacgccccgccgtcccctgcgacgccattttcgacagcatcgggccgccaggataatccagccccaacaatttggcggttttatcaaacgcttcaccggcggcatcgtcaatcgactctcccagcagttcgtactgaccgattccggtcacgctaatgagctgcgtatgtccgccggagaccagtagcgccacaaacgggaattccgggggattatcttccagcattggcgccagcagatgaccttccatatggtgtacaggaatggccggcacattccaggcaaatgccagtgaacgcccgacggttgcgccgaccagcagcgcgccgaccaggcccgggcctgcggtataggccaccgcgtcgatatcgctcgccgtcagaccggcttcttttaatgccgcctgaatcagcggcacggttttacgcacatgatcgcgggaagccagttcaggcactacgccgccgtagtcagcatgtaatttcacctgactatacaattggttggctaacagaccctttttgtcgtcgtaaatagcgatgccggtttcatcgcaggatgtttcaatacccagtacacgcatgacttgttttacctcgctctaataccgcgcagtgtaggtcgaatgcgggtggatgtataccctcagtcccgacttcgtgtatactccctccccttataaaagtccctttcaaaaaaggccgcggtgctttacaaagcagcagcaattgcagtaaaattccgcaccattttgaaataagctggcgttgatgccagcggcaaaccgaattaatcaaaggtgagaggcacatgccggtaattaaagtacgtgaaaacgagccgttcgacgtagctctgcgtcgcttcaagcgttcctgcgaaaaagcaggtgttctggcggaagttcgtcgtcgtgagttctatgaaaaaccgacgaccgaacgtaagcgcgctaaagcttctgcagtgaaacgtcacgcgaagaaactggctcgcgaaaacgcacgccgtactcgtctgtactaatcttttgagagcgggctgctctcaattcagatcgagttgtagttgtaaggccgtgcttccgaaaggaatgcgcggcttgttttcgtttatgcattagcatatacacaaaatcattcatgctgcgtccaggcggcaagagagtaaatccccggcgcttacgcaagtcagcgacaggggtgagcaaacgtagccaacactacggcagcctgaagaatgacgtgtataaaaggggcatatggctggacgaatcccacgcgtattcattaatgacctgctggcgagaaccgatatcgtcgatctgatcgacgtgcgcgtaaaactcaagaaacagggcaagaactatcacgcgtgttgtccattccataatgagaaaaccccttctttcaccgtaaacggtgaaaaacagttttatcactgctttggatgcggcgcgcatggcaatgcgatcgactttttgatgaattacgacaagctcgaatttgtcgaaaccgtcgaagaattagcggccatgcataacctggaaattccctatgaagcaggcaccgggcttagccagatagagcgccatcaacggcaaaacctctatcagttgatgaatggtctgaatgacttttatcagcagtcgcttacccatcctgcggcaaaacctgcgcgtgactatctgcaaaagcgcggtctgagcgctgaaattattcagcgtttcgccattggcttcgcgccgccagggtgggataacgcgttaaagcgcttcggtaataacagcgataacaaggcattgttgctggatgccgggatgctggtcaataacgagcagggcagcacttacgatcgtttccgtaatcgggtcatgttccctattcgggacaaacgcggcagggtgattggttttggcggtcgagtactggggaacgacacgccgaaataccttaactctccggaaacggacattttccataaaggccgccagctatatggtctttatgaggctcagcaatatagtgctgaaccgcaacgcttgcttgtggtcgaaggttatatggatgtcgtcgcactagcgcaatacgacattaactatgcggtcgcttcgctgggtacctcaaccacggcagaccatatgcatatgttattccgggcgacgaacaacgtaatttgctgttacgacggcgaccgggctggccgtgatgccgcctggagagcgctggaaacagcaatgccttatatgaccgacggtcggcaggtacgctttatgtttttacctgacggcgaagacccggatacgctggtgcgtaaagaaggcaaggcggcttttgaagcgcggatggagcaggcgcagccgctctctacgtttctgtttaatagcctcctgccgcaggtggatttaagctcgccggatggcagcacgcagttagccgcactggcgctgccgctcattaatcaggtgcctggcgacgcacaccgtattcagttgcgccagacgttggggctgaagttaggcattttcgatgatagtcagcttgatcgtttagtgccaaaacaggcggaaagcggcgtttcccgcccggctccgcagctaaaacgcacgaccatgcgtatactgataggattactggtgcaaaacccggatctcgcgccgttagtgccgcccttagacgcgctggatcagaataagctgcctggacttggcttatttaaagaattggtcaaaacttgtttggctcagccaggtcttactaccggacaacttctggaactctaccgtggcacaaatgatgctgcgacccttgaaaaattatcgatgtgggacgatatagcagataaggcgattgccgaaaagacctttaccgactcactcaaccatatgtttgattcgctgctgcaactgcgacaagaagagctgatcgctcgcgatcgcactcacggtttaagcagcgaagaacgccgagagctctggacgttaaaccaggagctggccagaaaatgaatttaacggcttaaatgccgcatatcgatcgggaagcccccgacagccgcagtgagaggcagcggccaaaatataagtatgccctcgctttaaatgtcgacagctataccgtcgacaccaatcaaacgaataagtgtggataccgtcttatggagcaaaacccgcagtcacagctgaaacttcttgtcacccgtggtaaggagcaaggctatctgacctatgctgaggtcaatgaccatctgccggaagatatcgtcgattcagatcaaattgaagatatcatccaaatgatcaacgacatgggtattcaggtaatggaagaagcgcctgatgccgatgatctgctgctggctgaaaataccaccagcaccgatgaagatgcggaagaagctgctgcacaagttctgtccagtgttgagtctgaaatcggtcgtacgactgacccggtacgcatgtatatgcgtgaaatgggcactgttgaactgttgacccgggaaggcgaaatcgacatcgctaaacgtatcgaagacgggatcaaccaggttcaatgctccgttgccgaatacccggaagccattacctatctgctggaacagtacgatcgcgttgaggctgaagaggctcgtttgtccgatcttatcaccggctttgtcgatccgaacgcggaagaagagatggcgccgaccgcaactcacgtcggttctgaactctcccaggaagacctggatgatgacgaagacgaagatgaagaagacggcgacgatgacgccgccgatgacgacaacagcattgaccctgaactggcacgcgaaaaattcgctgagctgcgcgcgcaatacgtcgttacgcgcgacaccatcaaagcgaaaggccgcagccatgctgccgcgcaggaagagattctgaagctgtctgaagtgttcaaacagttccgtctggtaccgaagcaattcgactatctggtcaacagtatgcgcgtgatgatggatcgcgtgcgtacccaggaacgtctgatcatgaagctctgcgtcgagcagtgcaaaatgccgaagaagaactttatcacgctgtttaccggtaatgaaaccagcgaaacctggttcaatgccgctatcgcgatgaacaaaccgtggtcggaaaaactgcacgatgtcgcggaagaagtgcaacgctgcctgcaaaaactgcggcagattgaagaagagaccggtctgaccatcgaacaggtgaaagacatcaaccgtcgcatgtccatcggggaagcgaaagcccgccgtgcgaagaaagagatggttgaagcgaacttgcgtctggttatttctatcgctaagaaatacaccaaccgtggcttgcaattccttgatctgattcaggaaggcaacatcggtctgatgaaagcggtagataagttcgaataccgtcgcggctacaaattctccacctatgcaacctggtggatccgtcaggcgatcacccgttctatcgccgatcaggcgcgcaccatccgtattccggtgcatatgattgagaccatcaacaagctcaaccgtatttctcgccagatgctgcaagagatgggccgcgagccaacgccggaagagctggctgaacggatgctgatgccggaagataaaattcgtaaggtgctaaagattgccaaagagccaatctccatggaaacgccgatcggcgacgatgaagattcgcatctgggtgatttcatcgaggataccaccctcgagctgccgctggactctgccactaccgagagcctgcgtgccgccactcacgacgttttggctggcctgaccgctcgtgaagcgaaagtgctgcgtatgcgtttcggtatcgatatgaacaccgaccacacgctggaagaagtgggtaaacagttcgatgttacccgcgaacgtatccgtcagatcgaagcgaaggcgctgcgtaaactgcgccacccgagccgttctgaagtgctgcgcagcttcctcgacgattaattcgccgcacacgtataaacgccgccgcaaggcggcgtttttttatcaggccatgcgcaagcgccctatttggcctgcagaatttctacacagcgcgagtattcgcgccctcattccccattgctatagcccacgcataatgagcgcttgatccagttcgcgataggcctcgaccagtttttccgttttaattcggtttaagccgctgggattcggcaacacccacaccatcgtcgcgccaatggcgatcttttgtttaccccaggcgataccgcgctggctgaacccctgttcaaaagcctgtttaccaagcaccgccagcgccgcgggctggtagtcctctattttttcaatcaggtttcgtccgccgctacgtaattcatgcaacttcacctcagtcgcttgtaccgtcggtcggtcgacgagtttcgttaccccgcagcgaaaatccagtaatttttccgcctcttccggtttcaactgtcgatcggtgaaaccggccaaatgaataactttccaaaaacgattcgcgggatgcgcaaacggaaagccggtattcgccgaggagagtcccggattgatgccgcaaaaaaccacccgtagccctggcgccagtatgtccttaaccattattactcctgagcaatacaacgttctttaagtataacgggttgaaaacacattgtttataaaaacagcacccgcacggttacggctggattacagcgtaaagttacattataatccaccgccacggccccttagctcagtggttagagcaggcgactcataatcgcttggtcgctggttcaagtccagcaggggccaccaaattttagctttaaaatcatataattaagccactctaaagagtggcctttttgtttctgacagggctcaccccataccgctatttacgatgccaataggctgccgcacgtaccaggtgtggatcaaaccccttttcaaagcactgacttaaacgttttaccgttttgccttcgccagtaatccagatgaaatagtctgattctggtattgtcagctgcgacaggcgcgtttgcattgcctgttcatcgccgccaacaacatattccacagtaatatccgtcaaatgggcgagataatcgcggtatgccgcatcctgaatgctcaccagcgcggttaccgcagggcgcacaggcagacggctaagcgattccagacgacgacgtagcgcaggcataccggactcatcgcagacataaacctgacaggcatactcttccggcaccaccagcgaaccgcgcggcccgccgatcgtcagtgtatcgccttcacgggcttccattgcccaacggctggctacgccgccatcgtggataaagaaatccagcgccagctcgcgacgcgcctcgtcatacagcggcgtgtaatccctggagaccgggcgaacgccctccccccagataatgccttcctcagtgactgtcggaggcgtaaagcgacagcctggctcagggaaaaaaactttcgtgtgatcgtcaaagcccagggagatgaaaccgtccagcgcctcgccgccaagtacgatccgctgaaatcctgcgctaatacgttctacccgcagaacgatcagctcgcgaaaacgcagctcattacgaacacgctgtgggtagcgtacggatgatgtcgtcattttttgccttcgtgaagtaatacgatatatctaaattaaagttttaaatgataatgattgttaatcagtaaaaatgcaactgttttttgatagtgttctggcaacacatcgctaatcacaacttcaaaataaaacgttataaattaatagattatatcaacaatcgcttttatccttgctaaaaaccatcatttagatataaattagatatatctaaataagcaggaggcaatgatgcaaaatcaacatgaagggtgttgcaaaaaccgggatcatatgcacgatggttgctgcaaagatcgagaacatcagcatgaaggctgccatagcgcgcatcagcatgagaacgccagttgcggcggcgagcaccgtcacggacacggctgtggtcgtcatggacagggcggtggtcgacgtcagcgattttttggccacggggaacttcggctggtcattcttgatatcctgacccgggacgccagccacggctatgaactgattaaagcgatagaaaacctgacggggggcggctatacgccaagcgctggtgtgatctaccctacgctggattttttacaggatcagcaatttatcacgattagcgacgaagaaggcgggcggaaaaaaatcgcgattaccgcgaacggcgcgcaatggcttgatgaaaatcgcgaacacctgacgcatattcaggcgcggctaaaagcccgttgtgtgggcatggagttacgtaaaaatccgcagatgaagcgggcgctggataacttcaaggccgtgctggatctgcggataaaccacagcgatatcaacgacgcgcaaatcaaacgcattatcggcgtgattgatcgcgcggcgctggaaatcgccgaactggattaagcgggctgcgtgtcctcttcgcggacgcggaacacgttaaccagctcttttaaatgtaacgcctgttcgttcagcgacgccgcggcggcaacagactcttccacaaggcaggagttttgttgcgtggcggcgtcaatcaggccaatcgcgctgttaatctgcgaaataccgtcagtttgctcacggctggcctgcccaatctcgcgtaatatcacatccatctcttcgacgttatccaccatgccattaatcagggcgctggctttctccaccaggtgcatcccttcctgagtctgactggttgaatcttcaatcaaattacggatttcactggctgacgaggcgctcttttgcgccaactggcgaacctctccggcgacaacggcaaaaccacgtccatgttcgcccgcacgcgccgcttcaaccgccgcgttcagcgccagaatattggtctgaaaggcaatggaatcaatgatattgatgatatccgacatacgatttgccgtatcgttaatgacgcgcattttctgcgtcacttgattcatcatctccccattgtttttcactacgctggcggcgccggcagagagtttggtcgcttcactggtatggtcagctgtgtttttaaccgtggcggtaatctgttccatcgacgccgccgtttcttcaaccgagctggcctgttcttccgtacgcgcggccaaatcctggttaccggcgacaatttgcgccgccgccgtggagatactctccgaaccgttttgcacttcctgtacgatatccagcagacgcgttttcatcgccattaatgcttgcagtagtacgcctgtttcatctttatagtcggtggtgatatggcgagtcagatcgccatcggcaatcgcctcggcaaagcgtaccgcttcatcaagcggtcgggtaatggaacgtacgatataccatcccattacgcatccggcagcgatgcttatcagcgccagggtaattaacagcgtccggttagttttaaaatctccttcgacctgcacgcccgcgttgtgcatctgcgcatcctgaacggcgataagttcctgaactttgtccttatagaccttttgcacttgcaccgttctggtcatcatctcctgaatggccgcctgacgattatggctttgaatatcttgcaaaatacggaatctggactccaggtattgctggcgcgcttcacggatctcggtaatgattttctgcgaagccgcatcgtgacgattgctggaaagctcatccagtaacgccgtaatacgctggcttatttcatccagctctttctgcgaactctggctccagcgcccctcttcatccagtaacatgagctgctgcgcgatgatgaaatcattaaaattatcgattaacagattggctttcaccgtggtgggataatcattggtaataatgttctgcatacccgtattagcccgatcaaggctaaacaaagacagagcggaactcaccaccatgagaacaatgaataagccaaaggccataaataattttgaacgtattttaatgttatgcaaaaacatattttctccctgggattgcatatcctcatacaggaagatttatcggcaataatgttactaactttatgatattgatcgctttttatttcggaacattattagtaagtaatatttattgttcacagaaagatgaaccaaaagtgacataaattggcactaataatgaaagaaatacgctaaaaggttaaccatttcttatttattaactgagtttatacctattaataggtagacaagggagaaggaataaatatcacattatttttaacatcacaggccactgatactctctatgatggcaggcaccgccttctatcagagcgcatccgcccggtaagcctgttgctaccgggcggatgtcattaccattgctacctacaaataaacttaatgcagtaccgtgaccgcatcctccagccggctggcacggtgttttaccattgcggagacttgtgcgctctcttccaccagcgccgcatttttctgggttatgcggttcaactcgtccacggcgcgggtcaggctggaaagcccatctgtctgttcctgcgtcgactgactgatacgtgcgataagcagggtgacattttgcacctgagctacaatgtcatccatggtacggcctgcggcgtgaacctgctcggagcctgactgcacctttgttgcgctggcatcaattaatttacgaatatcgttcgccgcattagcgctgcggctggcaagatggcgtacctcgccagcaaccacggcaaaccctttcccctgctcgcccgctctcgccgcttctaccgccgcattcagcgccaggatattcgtctgaaaagcgatatcgttaattagcgtggtgatcgtcccgatacgttgcgtactgtgagcgatatcatccatcgttttaatcaccgtatccatcgcctcacctccctgagtcgccgcgctactggccgccatggaaagcttatccgcagcggaagccgtctcggaattgagcttcacggactccgccatctggttcatggtcgttaccgtttcctgaacattctccacggtctgacgggtgtgttcgttcagatcattattacccttcgccagcctttcactgccgtttctgacgctggaaacctgacttgatacgtcattgatcagccagcggcacatcaagccaagctgccccacggccctcagcgtcagccccaactcatcgctacgattaagatgttgtacgctgttgcgttcgccggtcgccactttcagcgcctgcgtcgccacattttcaatgggacgcacaatttgccattccaatagcgccgtacctgccagcatcgccaacgcgcccaacagcaacgcctgccatgaggcatccgtaccgaacaacgccaacgccagcattacggccattagccccataatgctacgcactcgccagcgaacaggcatagcgggcagtttgcccagcaaaccctgacgaaccaccaggcctttatgaattcgtttactacaccgcccttcatttagcgcctgatataaaggctcgacggcggcaacctcatcatccgtggcgcgggtacggatcgacatatatccagtcacacgcccttcacgtatcatcggtaccgcgttggcccgcacccaataatggtcgccgtttttacgccggtttttcacaatgccgctccacggttcgccctgttttagggtgtaccacatatctgcgaaggcagctttcggcatatccggatgacgcaccagattatgtggctgcgccagtaactcgtttaactgatagccgctcacttggacaaaagtgtcattggcgtgagtgatatagctttccaggtcggtcgtagacatcagagtggtatcatcatccagcggggtatttagctggctgacgtagggatgagaagacatgatagcgtcctgtgcaggttatctggatgttaatttttcgctcagatgttatttcggcgctaatctatttatctttagttgttaaaattgctctggatcgcaatttgcgattaatccttaatatttgtacgattttcacctcatcctgcgccttattttcattatgaaattgtttagcgtggacaacctttttctttaaaatctgccctggctcacctttttctcacgccgccgctaacgcaacacaccgtaaaccgtaaaacaagatctgctcaaaatgcatccaattgttaacgcatgatattaaatgttgggtaaatgtgattattcctggtgtttatcccgattttcactatgggcttagacccccgctaatccctgcaatacttaattcagtatcatgtgatacacggccctctggagctcattttgaacaggttaccttccagcgcatcggctttggcctgtagcgcgcacgcactgaatctcatcgagaagcgaacgctaaaccatgaggaaatgaaagcactaaaccgagaggtcattgactactttaaagagcatgtaaatccaggatttctggaataccggaaatctgttaccgccggcggggattacggagccgtagagtggcaagcgggcagtttgaatacgcttgtcgacacccaggggcaggagtttatcgactgtcttggggggtttggcatctttaacgtggggcaccgtaatcctgttgtggtatccgccgtccagaatcaactcgcaaaacaacctctccacagccaggagttacttgatcccttgcgggcgatgctggcaaaaacgctggcggcgctgacaccggggaaactcaagtacagctttttctgtaacagcggcaccgaatccgtcgaagcggcgctaaaactggcaaaagcgtatcagtcgccgcgcggcaagtttacctttatcgccaccagcggcgcatttcatggcaaatcattgggcgcgctctccgccacggccaaatccaccttccgcagaccctttatgcctttactgccgggcttccgccatgtgccgtttggcaatatcgacgcgatgagcatggcatttagcgaaggcaaaaaaacgggcgacgagatagcagccgtgattctggagcctattcagggtgaaggcggcgtgatcctgccgccgcagggatacctgacagaggtacgtaagctctgtgatgaattcggcgctctgatgattctggatgaagtacaaaccggcatggggcgtaccggcaagatgtttgcctgcgagcacgaaaatgtgcagcctgatattctgtgtctggcgaaagccctgggcggcggcgtgatgccgattggcgccaccatcgcgactgaggaggtgttttcggttctgttcgacaatcccttcctgcataccaccacttttggcggtaatccgctggcttgtgctgccgcgctggcgaccattaacgtcctgctggagcaaaatctcccggcccaggcggaacaaaaaggcgatacgctcctggatggttttcgacaacttgcgcgtgaatatcccaatctggtacacgatgcgcgcggcaaaggtatgttgatggccattgaatttgtcgacaacgaaacgggctaccgttttgccagtgagatgttccgtcaacgcgtgctggtcgctggtacgctgaataatgcgaaaacaattcgtatcgagccaccgctcacgctaaccattgaactgtgcgaacaggtattgaaatcagcgcgtaatgcgctggcggcaatgcaggtgagcgttgaagaggtttaaaaacgatgccggatggcgctgtgcttatccggcctgttttccccgggtcgcggcctcttttttgaatcccatcacaatcaccacattccccttttcccttttacctcgcgacggctacagtagtaactcatccgaccacataacaataattttacatactggatacgcttatgagctacccgtcgctgttcgccccgctcgatctgggctttactactctcagaaaccgtgtgctgatgggatcgatgcacacgggtctggaggaacatcctgatggcgctgagcgcctggcggcattttatgccgagcgcgcgcgacacggcgtagcgttaatcgtcaccggcggtattgcgcccgttccctccggggtcgtgatgaccggcggcgcgatgctgaacgatgccagccagttaacgcctcaccgcgtggtgaccgatgccgtacatgcgcaaggcggtaaaatcgcgctgcaaattctgcacaccgggcgttacagctatcagccgcacctggtcgcgccgtcggcaattcaggcgccaatcaaccgctttatgccgcatgaactgacgcatgatgaaatcttgcagttaatcgacgacttcgcgcattgcgcgcaactggcgcgggaagcaggctacgacggcgtagaggtgatgggatcagagggctatctgattaatgaatttctcacgcggcgaactaaccatcgcgatgacgaatggggcggcgactatgccagccgtatgcgcttcgcggttgaggtagtacgcgcggtacgccagcgggtagggaacgactttattattatctatcgcctgtcgatgctcgatctggtggaaaatggcggcacgttcgacgaaacggtacaactggcgcaagccattgaagccgcaggcgcaagcctaattaataccggcattggctggcatgaggcgcgaatcccgaccatcgccacgccagtaccgcgtggcgcctttagctgggtgacgcggaaactcaaaggtcatgtgtcggttccgctgatcgcgaccaatcgcattaacgatccgcaggtcgccgagacgatcctgacgcgcggcgatgccgatatggtgtcgatggcgcgtcccttccttgccgatgccgaattcctgactaaagcgcaatccggacgcgcagatgagatcaacacctgtatcggctgtaatcaggcctgtctggatcggatcttcatcggcaaagtgacctcctgtctggtgaacccgcgcgcctgtcacgaaacccacatgccgataacgccggccatacgcaaaaagaacctggccgttgtcggcgcaggcccggcggggctggctttcgcgattaacgccgcgtcgcgcggccatcatgtcacgctgtttgacgctcagagtgaaattggcggtcagtttactatcgccaggcagatcccgggtaaagaggagttttacgaaacgctgcgctactaccgtcgaatgatcgatgttactggcgttacgctgaaactgaaccaacgggtgaacgcagaggatcttcagccgtttgacgaagcgatcctcgcttgtggaatagtaccgcgccgcccgccgatagacggtatcgatcatccaaaagcattgacctacctggaggtattgcgcgataaggcgccggttggtaagcgagtggcgatcatcggctgcggcgggatcggttttgacacggccatgtatctgagccagcacggcgaatccaccagccaaaatattgctgaattttgtacggaatggggaattgataccagcctgcaacaggcaggcggtctgcgcccggaaggcccgcgcctggcacgtagtccacggcaaatcgtcatgctgcaacgcaaaaccagcaagccgggcgaagggttaggtaaaaccaccggctggatccatcgcgcgacgttactggcgcgcggcgtgaagatgatcccggcggtcagttaccagaagatcgacgacgacggattacatctcttgatcggcggcgaaccgcagttgctggaagtggatcatgtggtgatctgcgccggacaggaacctcgccgcgagctggcggacccgttacgcgccgcaggtaaaacggtacatcttatcggcggatgcgatgtcgcgatggagctggatgcccgacgggcgattgcccagggcacccgactggcactggagatttaacgactttgcctgatggcgctacgcttatcgggcttacgccgtcataccggttttataggccggtatgacgcttgagcgccttatcgacggcgtccctgcttcaccgctttcaaaatgacaaatttattgttggttgctatcgtcgcgcaattaccgaaaatcttcttcagcttgtggaaatagtccagatggcggttcgccacaatatacagttcgccgttgattttcaggcagcggcgggcgtgatggaacatctcccaggcgatattgtccgtcagcgcatgtttctggtggaacggcggattgcagaacaccgcgttaaaacggaacggctccacgccggagagcgcgttgttgatcataaattcgcagcgttcgaatgcttccggcaggttcgtttctacattcaaacggctggaatctaccgccatcggcgattcatcgacaaatactacgttcgcctgcggatttttcgccagtaagctcaggccaatcaccccattgccgcagccgagatcgacaatctccccgtcgaggttttccggcaaatgctgcataaagaagcgcgcgccgatatccaatccggtacgagaaaacacattcgcgtggttgtgaatcgtccagcctgtatcttccagtttccagcttagcgtttgcggcgcgtcggccagttgcggatgactgaaggtacagttaatcaggcgcgctttcttccacgccagcgtcgtcgtggttgggcccagcactttttcaaacagttccagcgtagaggtatgaatatcacgcgctttcgcgccggcgataatacgcgtttgcgccgtaacgaccttacgcaaagcgcgtaactgctgttccagcaacgccagcgttttcggtaccttaatcaataccacgcccggcgcctgcgggtagtcagcggtactgtcgagaaacgttacgctggactccgcgatgccgttatggcgtaaattctctcgcgtacccagttcgcttaaatacgaatcgccaatactgtatggcgaatgctccgccagcgcacagcttagcgcgccaaacgtatcattcaggatcagcaccgggccgcgaatttccgtctcatccaactgttgcagcagatactcatcggccgcctcccacgccagaagcgggttaacatcatccgtttgcggaaaacgtttcagcgtcagtgaacggaaaccgtcgtctacgtggctcattaggcctcctgaatggtaaaattgcggcgttatccctgaaaagggtgcgtgagtatacactttttatcagcaacatggagctttgatgacctcactaacttaccttcaggggtatccggaacatctccttgcccaggtgcgcgccttaatcgccgagcagcgcctgggagcagtgctggaaaaacgttatcccggcgcgcatgattacgccactgacaaagcgctatatcactatactcaggaactgaaaagtcagtttctgcgcaatgcgccgcccattaataaagtgatgtatgacagcaagatccatgtgctgaaaaatgcgctgggactgcataccgctgtctcgcgcgttcagggcggcaagctcaaggcaaaggcggagatccgcgtcgccaccgtgtttcgtaacgccccggagccattcttacggatgattgtggttcacgagctggcgcacctgaaagagaaagatcataacaaagcgttttatcagctctgctgccatatggagccgcagtaccatcaactggagtttgatacgcgactgtggctgacgcatcaggcgctgtcggcacaataaattctgaaaatgccccttcccccgtatctttttaacggcgtgggcataaaatcggcgcgttcacatttcgctcattgcctgccgccacgtcaaggatgacgatctgtagagggtattttttatccaccgccaacggaaccgcgcaacgaccatgctctcacaatgtgcccgttttatccgccgcctctgttttacacgccgggccttaacagtggcgtgttttctgcttgtcgcagcaggcgtcgcgcttttctattccaactggcttatcgtcaacgcctcacagcatctgacatggaatgacattcagaccgttcccgcccgcaacgtcgggctggtgttaggcgccaaacccggcaatcggtattttacccggcggattaatactgccgccgcgttgtatcacgccggtaaagtgaagtggctgttagtcagcggcgataatggcaaaaaagagtacgatgaaccttcggcgatgcagcaggcgctgatggcgaaaggtgtgccggaggcggccattttttgtgattatgccggattctccacgctggactccgtggttcgcgcccggaaagtgtttggcgaaagccgcattacgattatctcgcaagcatttcataatcaacgggcgatctggctggcgcaacaatatggcattgacgctatcggcgttaacgcgccggatctgaataaaaggcacggaacctacacacgacttcgggaaaagctggcgcgggttagcgcagtgctggatgccaaaattttgcatcgtcagcctaaatatctgggcgctggcgtcactattggggctgatagcgcacacgggtgcccttctcgccagtaaaatgccagagtgcgtcgcagcgcactggcaagggcggaaaggcgtgctacattgacgaaaaatccctttctggagtccgctgacgtttatgatacgtttcgctgtaattgggactaactggatcacgcgccagtttgtcgacgccgcccatgaaaccggcaaattcaggctcgccgccgtttactcccgtagtcttgaacaggcgcagtctttcgcaaatgattatcccgtcgagcatctatttacctcgctggaagcgatggcgcaaagcgacgcgattgaggcggtttatatcgccagcccgaattccctgcatttctcccagacgcagcgctttttgcagcataaaaaacatgtcatgtgcgaaaagccgctggcttctaacctggcggaggttgatgccgctatcgcctgcgcgcgcgataatcagcgggtactgtttgaagcctttaaaaccgcctgcctgcccaatttcctgctgctgcgggaatcgttgccgaaaatcggcagaatgcataaagcattactaaattactgccagtactcttcacgttatcagcgctatctgaacggtgaaaatccgaatacgtttaatccggccttctccaatggttcgattatggatatcgggtattactgtctggcgtcggcgatcgcgctatggggcgagccgcgcagcgttcaggcgtcggcgaatttattggaaagcggagtagatgcgcacggcgtcgtggttatggattacggcgattttagcgtcacgctacagcattccaaagtcagcgactcggtactggccagtgaaattcagggcgagaggggatcgctggtcattgaaaagctgtcggaatgccagaaagtgtgttttgcgccgcgcggcgcgctgatgcaggatctgacccagcctcagcatattaataccatgctgtatgaagccggggcgtttgcccagcttattgaaaaccacgccgtggaacatccggggttgtcgctaagtcgcgccacggcaaaatggctgacagaaatacgccgtcaaaccggggtcatcttcccggcggacgatctgacccatccccttactgcgtaaaattatgtaaatcatatgttacaggtcattgactctacgcgtggcctgtcatactttgttacgcgcaaaggggagtaacttcattgccggtcgatcgtcattacgatgtgtgcaaaaccacatccggtcaccgggcagccataaaggaatgcgtcagcgtattcctttattgttgtaagtgagaccttgccgaatggcaaggtctatgcataaaagcaacggctaatgccattcggcgttagccgttttttttttttgcatagggagaaataatgaatactgttggtacgccattattatggggtggattcgcggttgttgtggtgataatgctatccatcgacctgttgttgcagggacgccgtggcgcacatgcgatgtcgatgaaacaagcggcaggatggtcaatcctgtgggtaacgctctcgctactgtttaacgccgctttctggtggtatctggctgaaacgcaagggcgcgaagttgctgacccgcaggcattggcgttccttaccggctatctgattgagaagtcgctggccgtagataacgtctttgtctggctgatgctgtttagctatttctccgtccctccggctctgcaacgccgggtgctggtgtatggggttcttggcgcgatcgtgttgcgtactatcatgattttcgccggtacctggcttatcactcagttcgaatggctgctgtatgtgttcggcgccttcctgctgtttaccggcgtaaaaatggcgctggcgaaggaagatgaatccggcattggcgaaaaaccgatggtgcgttggctgcgcgggcatctgcgcatgaccgatacgatcgagaacgagcactttttcgtacgtaaaaacggcctgctgtatgccacgccgctgctgctggtgctgattatggttgagttcagcgatgtgatcttcgccgttgacagtattccggcgatctttgcggtcaccaccgacccgttcatcgtactgacctctaacctgtttgccatcttaggactgcgcgcgatgtacttcctgctgtccggcgtggcggaacgcttctcgatgctgaaatatggtctggcggtcattctggtctttatcggcattaagatgctgatcgtcgacttctaccatattcctatcgcgatttcgctgggcgtagtgtttggtattctgaccattacgctggtgattaacgcctgggttaaccatcagcgcgataagaaactacgagcgcaataatcttttatcggggtaaacctgccccgtcaaaaacgcccgacagcgcacacctgtcgggcgtttttgtttaacatgtcacaatactgttaatataaagttataaaacatgatcacagcaaaaaatccaggatatttcgcttcccgaaccttcaactttccttatactcaaccaggcaaacactttgttacatcctgaaagatgcgccgtaagagcgtgcaggggatgaccagcaacacaatacaaggaatatgaaatggctacgcaacgagcatcagggctactgcagcgtttagcgcaaggcagtctggttaaacaaattttagtgggtctggtactggggattttactggcatggatttctaagcctgcggcagaagcggttggcttgcttggcaccctgttcgtcggcgccttaaaagcggtcgcccccgttctggtgctgatgctggtaatggcctcgatcgccaaccaccagcacggccaaaaaaccaatattcgccctattctctttctttacctgctaggcaccttttcagccgcgctggcggccgttgtgttcagcttcgccttcccttcaacgctgcatctgtccagtagcgcccaggatatcgtgccgccgtccggcattgtagaagtcttgcgcggtctgctgatgagcatggtgtcgaaccccatcgacgcgctgctgaacgctaactatatcgggattctggtatgggccgtcggtctgggatttgccctgcgtcatggtaatgaaaccaccaaaaacctcgtgaacgatatgtctaacgccgtgacctttatggtgaaactggtgatccgtttcgcgccagtcggtatttttggtctggtttcatcaacgcttgcaaccaccggcttctccaccctgtggggctatgcgcacctgctggtcgtcttgattggctgtatgctgctggtcgcgctggtggtcaacccgctgttggtattctggaaaattcgtcgcaacccttatccgctggtgttcgcctgcctgcgtgaaagcggcgtttatgccttctttacccgcagctctgccgccaatattccagtgaatatggcgctgtgcgaaaagctgaatctggacagggatacttactccgtttccattccgctgggcgccactatcaatatggccggcgcggcaattaccattacggttctgacgttggcggcagtccatacgttaggcgtcccggtggatctgcctacagcgctgctgctgagcgtggtggcctcgctgtgtgcttgcggcgcctccggcgtggcaggcggttcattgctgctgatcccgctggcgtgcaacatgtttggcatcccgaacgatatcgcgatgcaggtagtagcggtcggctttattatcggcgtattgcaggattcgtgtgaaacggcgctgaactcgtctaccgatgttctgttcactgcggcagcctgccaggcagaggacgaacgtctggcgaataacgccttgcgtagctaagtgattatcgatgccggatggcgtatgccatccggcgtaacgatagatctgaatctcccaatccataggctgtgatggaaagcgaattgatgttcacgcgcaacatcctcgcgtaacgttatatgtagatggcgtctgccgcggcgctcggtcagcgtaaagtataaagtgtcagcctgtgtaaatcctctcgccaccctcccttgcgataagcaaaatcaaagctcaacgacgcgtaatttctataacggacttcgttgacctttgttacaattagatgcattttgaatttttgtgtgttagtgcttgcttacttcacaacttaacaaggaatagttcaggccgcgaatttgccgtttccgcaacgctgataaaaactccaactctgttgcggcagtgcaaacctcagatcaccggcgtgacgttaaccgattctccaggaatactgaatggaactactgactcaattgctgaatgccctgtgggctcaggactttgaaacactggccaatccttccatgattggcatgttatattttgtgttatttatgattttgtttctggaaaatgggctgctccctgccgcctttttgcctggcgacagcctgttgatcctggtcggcgtgctgatcgccaaaggcgcgatgggttatccacaaaccattttgctgcttaccgtcgcggccagcctgggttgctgggtcagctatattcagggccgctggctggggaatacccgcaccgtgcaaaactggctctctcatctccccgcacattatcatcaacgcgcccatcaccttttccataaacacggcctgtcggcactattgataggccgttttatcgcgtttgtcagaacgctgctgcccaccattgccggcatatccggtctgaataacgcgcgctttcagttcttcaactggatgagcggcttgttgtgggtgcttatcctgacgtcgctgggctatctgctgggcaaaacgcccgtctttatgaagtatgaagatcagttaatgtcatgcctgatgctgctgcccgtggtgctgctcttttttggcctggcgggttcactggtcatgctgtggaaaaagaagtatgggagccggggataacttatgcttaaaccacgcataactgcccgacaactcatttggatcagcgcttttctactgatgctgaccatactcatgatgacgtggtcaacgctgcgtcagcaagagtcgacgctggccattcgcgcggttaaccagggcgccagtatgccagacggcttctcagttctgcatcatctggatgcgaacggcattcattttaaaagcattacgcctaaaaatgacatgttgctcattaccttcgattcccctgcgcaaagcgccgcagcaaaaacagtgcttgatcaaacgttaccacacggttatgtcgtcgctcagcaggacgatgacaacgaaacggtacagtggctgtcccgcttacgggaaagctcacaccgctttggctaatctccaggaatccgaatcatatcactcactttggtgatttcattgtttaatgactatgattaataaagcggtgtttaacccaccgcgttattatcgggatcaccgccccggacaacgggtccgaacataagggaaagttcaggaatgaaataccgcatcgctttggctatcacgctttttacacttagcgccggtagctacgctaattcgctttgtcaggaaaaagagcaggatatacaaaaggaaattagctacgctgaaaagcacaacaatcagcgccgtattgagggtctgaacaaggcgctcagcgaagtacgcgccaattgtactgacagcaagctgcgcgccgagcatcagaaaaagatcgctgagcaaaaagaagaggtagccgaacgccaacgtgatttagccgaggcaaaagcaaaaggcgatgcggataaaatagacaaacgtgaacgtaagctggccgaggctcaggatgagctaaaaaaacttgaggccagagactactaaattaacgccgaatgtaaatactcactcacctggagaaaactatgtcgaaagataacactacggaacatctgcgcgctgagttgaaatccctgaccgatacgcttgaagaagtgctgagctcttcgggcgaaaagtcgaaagaagagttgagtaagattcgtagcaaagccgagcgcgcgctgaaagagagccgttaccgcctgggcgaaacgggtgatgtgattgccaaacagactcgcgtcgccgccgcccgcgccgatgattatgtgcgcgaaaatccctggacaggcgtaggcattggcgccgctgtcggtctggtgttgggcgtactgctgacgcgtcgttaattatggcggagtctcgacaggcacaaggaccaggcaaaagcgtactgggtatcgggcagcggattgtcaccattatcgttgagatggtggaaacccggctgcgactggcggtagtagaactggaagaagagaaagcgaacctctttcagcttttgctgatggtaggtcttaccatgctcttcgcggcgtttggcttaatgagcctgatggttctggtcatctgggctatcgatcctcagtaccgtttgaacgcgatgatcgctaccacagttgtgctgttagtgcttgcgctaatcggcggcatctggactttgcgcaaagcgcgtcagtccacgctattgcgccatacgcggcacgaactggctaacgatcggcaaattctggaggacgatcagtcgtgagcagcaaaggcgaacgcgaaaaacgtaaagcgctgcttctcagtcagatccagcagcaacggctggatctgtccgccagccgtcgcgactggctggagaccaccggcgcgtacgatcgcggctggaatacggtgttaagcctgcgctcctgggcgctggtcggtagcagcgtaatggccatctggaccatccgtcatcctaatatgttggtacgctgggcgaaacgcggcctgggtatctggagcgcctggcgcctggtaaaaactaccctccgtcaacaacagctccgcggttaatatcttttcttttatagcatcgcgccatcaggttatcacctggtggcgcgatacttttatgcatatcgtctctttagcaatcactcaaattttttgaaaaaatttggcaattttccttgctaacaattcctgcacgccacgtttatgattctctccagcgataacaatgatgcgcaaaaccgcgtcattgctcatgaaaatagcagcagccgccgaatcggccccctggagaataaaatgaaaaaattagaagatgttggtgtactgatagcgcgtattttaatgccagttctgtttattaccgcaggatggggaaaaattagcggctatgcgggcacacagcagtatatggaagcgatgggcgtaccaggattcctgctgccgctcaccatactgcttgagttcggcggcggtctggcgattctgctggggttcctcacccgcaccactgcgcttttcaccgctggttttacgttgctgacggcattgatcttccatagcaattttgcagaaggtgtaaactcgctgatgtttatgaaaaacctgaccattgccggcggattcttattactggcgttaaccgggcctggcgcgttcagccttgaccgtctgctgaataaaaagtggtaagcaatctatactcaattaaaaaagcgagggaatagcgcctcgcttttgtcatctgaaggagagagacatgggacaactgatcgatggcgtctggcacgatacctggtatgacaccaaatcttccggggggaaatttcagcgttcagcgtcggctttccgcaactggcttaccgctgacggcgcgcccggaccttccggcgaaggcggattcgccgcagaaaaagatcgttaccatctgtacgtttcccttgcctgcccctgggcgcatcgcacgctcattttccgtaaactgaaaggtctggagccgtttattccggtttccgtcgtgaatccattgatgctggaaaacggctggacgtttgatgatacttttccggcggccaccggcgataccctctatcagcatgaatttctctaccagttgtatctgcacgccgatccacactacagcggccgcgtcaccgtaccggtcttatgggataaaaaaaatcatactatcgtcagcaacgagtccgccgaaatcattcgtatgtttaactccgccttcgatgggctgggcgctaaagccggggattactatccccccgcgctgcaaagcaaaattgacgagttaaacggctggatttatgacaacgttaataacggcgtttataaagcaggcttcgccaccagccagcaagcgtatgatgaagcggtagacaaggtatttactgcgctggcgcgcctggaacagattctcggacagcaccgctatctgacgggcgaccagttgaccgaggcggatatccgcttatggacgaccctggtacgctttgatccggtttacgtgactcatttcaaatgcgacaaataccgaatcagcgactacctgaatctgtacggtttcctgcgcgatatctatcaaatatcgggcattgctgaaactgttaatatggaccatattcgtcaccactatttccgtagccataaaacgattaaccccacgggtatcatttctgtcggaccgtggcaggatctgctcgaacctcacgggcgcgacgtgcgctttggctaatttcaggcgtcctccgggacgccttattaataaataccacaaatatttaccagcatttcattcgcggctattcttagtttgattactttaaaaacaagtgattgaaccattattgaggcgaaaatggattggtatttaaaggttttaaaaaattatctgggatttggcggccgcgcgcgacgcaaagagtactggatgtttattctggtcaatatcatctttacctttgtgttgggcctgctggacgccatgcttggctggcaacgcgccgggggtgaaggcgttctgaccaccatttacggcgttctgatctttttaccgtggtgggccgtgcagttccgtcgtctgcatgacactgaccgctccgcatggtggctactgttgctacttatccccattatcggctggcttatcatcatcgcgttcaactgccagaatggtacgccgggcgacaaccgcttcggccccgatccgaaacgtttttcctgatggcggcgcggcgccgcttttaaagcgccgcgcgctatttattttccggcgaatagcttaggtatttcccgcaggcaccaggcttttgcctcccccatactgtcgcgccgccaggccataataatatcgatttcgctggtcgattccgggctgaccacgcgtagccgcccttcggcaatatcctgttccaccatcgaatatggcatggtcgcgacgccaagcccggccagcagcgcctgacgtttatcttcaatcgtgcttaccgtcagacgtggctgcttatccagcagttgcaccgttaataccggccgctcgcgcgcggtatccgctaccgctacgccgcggtatttaacccgcgtcacttccgaaagcggctccggctcctgatgaatagggtggtcaggcgcggcgacatacacattcattaacgtatacaacttacgggagttaatttccgacgacgatcgaaaatgcatatccggagcgataacgatatccgcccgtccctgctcaagccgctcccatgcgccagccagtacttcggtaatcaatgaaagctgcgtattggctttagcggccagccggtcgatcagtggaaaaaaagcaggcgtcggtaccagagcttcagtgactagcgtcagatgcgtttcccaaccgcgggccaacgcttcagcatccgtcgttaacttgtctgccgcttccagcaatacccgcccgcgttccagcagcatacgtccgacgttggtgaattttgtacgatggccggagcgatcgaacagtacaacgtccaactcttcttccagcttctgcatggtgtaactcagcgcggagggcacacgccccaactcatcagccgctgcggcaaaactgccccggcggtcaatggcgtccatcacacgcaatgcttcaagcgtcagcgctctctctttagccataacgttctcattcaggaaatttgaacataccgggcagaatatctggctaacaatgcagcgtccagccccttaacataaaaggaagtaaagagaggttaataacgatgattacgacccgaaccgccaaacaatgtggacaggcagactacggatggctacaggcccgctataccttctcctttggacactatttcgaccctacactgctaggctacgcgtcgttgcgcgtactgaaccaggaagtgctggcgccgggcgcctcttttcagcctcgaacttacccaaaggtggatattttaaacctgattctggacggcgaagcggaataccgcgacagcgacggcaaccatgtacaggctaaagcgggcgaagcgttactgctcgccgcgcagccgggcattagctacagcgaacataatatcagcaaagttaagccgttaacccgaatgcaactgtggcttgacgcctgtcctgaacgggaaaacacgctggtacaaaaaatcccactcctggcggcgcaacaacagcttcttgcctcgcccgacggtgagcaaaacagcttacaactgcgccaacaggtctgggtacatcatattacgctggagaaaggcgaatcgcttaatttccagcttcacgggccgcgcgcctatttgcagtcgattcacggtacgttccacgcgatgacgcacaacgaagaacgcgaggcgttaacctgcggagatggcgcatttattcgtgatgaacctaacattacgctggttgccgatacgccgctgcgcgcattactggtagatttaccggtgtagccagccagaaaaggagtcgcaagatgagcaaaaaatcggcgaagaaacgtcagcccgtggtaaaacctgccgtacaggaggcgatgagcgccgctgtgccgctgggctatgaagagatgctaaccgaactggaagccatcgtggcggacgccgaagcccggctggcagaagaagaggccgcagcctgaaatcatgccggatggcggcgcaagcgcccgatccggctgataacgggtagacccgataagcgcagcgccatcgggcaacacgctgccccgacgtcatgccggggcgttattattaatgcgctttactggccataatctcgatgatctgcttgtcggtctgctgcattgagcgacacgccagcgaacacaaattcgaaatagattgttcgacattgtgcgccacaatcccttcgtttccggtcaccgccgtatcatccaacgccatcagtacggctttccacgccgccgacgcgctggtagagactttcatcgcgcagctattcgacgcgccatcgcaaatcatcccgctgacatcaccaatcatactgctgatagccattgcgatagtgtcgtaacgaccatctatcagccacgccatacccgctgccgcgcccatcgccgccgtagttgccgcgcacagcgccgacaaacgcggaagctgatggtgaatatagatagcgctcaaatgcgataacattagcgcgcgcgccaggcgctcgtcatcggcgccgacatgttcagcaaccaccatgactggcaccgtggcggtaatcccctggttgccggagccggagttgctcatcgcgggcaacgtggcaccgcccattctggcgtctgacgccgcgctggtacggatcaaaatcgccgtggagagatctttcgccagcagaccgcgatcgcactgtttggccagcgtcgaaccgatatgcagcccccaggaaccacgcagtccctcctgcgacaacgcgccgtttagcctggccgcatcgagaataaagcggatagcgtcaaagggcaccgcattcacaaacgccaggatctcttccagcgaggtatgagacagcactcccagtggcgaggttttttcttcttcctgcgcattatcggcctgggtaaataccacacccttgtcggtttctatccgcacaatatttgtatgatcgccgacgatcgtgacacatgcccagctatcgccgctatacactttcgcccgtgaaaacagaatatcgttacatggctcctgcaacatcaccgcgacatgtccagcggccagcatcgcttttgcatcggcaacggctttagcggaagcgtcttttaacacctccaacccggctttcgcatcaccgcccaacgcgcccaacgccgcggcgatcggtagccctaccattcccgttcctggaacggtaacgcccataccatttttcatcagattgggcgaaacccacgcgtcaatgcgttcaactgtgccgttaagttcagccgccgccgccgctgccgccagcgccagtgaaattggctcagtacaccccagcgccggttttacttcttcctgtacggccagaataaaactttgccacaatggatttattttagattcaaacataacaacaaccttaatctcaggtatatcaagagaatgccaggaacggagaaacgcatagcagcagaccggtaataataatcaggtacaacgaagcgcctttatatttgtgcaatgcgggaaccttgtagaccaaccatgccggaattaaacagcccaccataccgaagatagggctacaaatagaggtgaagctcagtaccggcgcgttgagcacaatggcgctccaggccagcaaaatagcgaaaatcataatgccgcgctgtaccagattttccttaatcttctcggcgggcattttacggcgcaggatattcatcacaatgccttgcgtcgcttcgcggaatcctaaataaacgccaaagaaggcggtcatgacggcaaagatgttcagaattacgctaaccactttgacccagccagcgccatcgccgctaataaattgcgcggcgatcgccagggcggaaatattctgctcgtaggctttcaccgcttcgtcatgccccatcgccagggtgaaggaaaccgcatagaaaaatacggtaacgaacaggatgccaaacgcaatattcatggcacgcagcgctttatggcgtgcgacctcaatagatttttcgcgtgaacggtaagagatcaccattgggcttaacgtctggataaataaaatcgaggtcagcgtaaatggcagggtaataatggcgtttttaatcagcagggccatcggcggcagcgcgccaatgttatacagatgccacatacccaccatagagacgcccagcgccgccactaccagtagcttggtcagcaccatgccagtggagattttgaacagtaatttttcaccgcgtgaggaaatcgccaccaggatgcagatcagcaccagaccataaaatggactatcggaaagcaatccttccgttacgccgaaagtatgcagataagaggcgctgtcgttagtaatcgccgtagaatagacgaacatccagatgacgagcatcacaaagtacagcgcgcctaataaaataccccagtttttgcccagatagccgctgatcacgctggggtagtctttacattccggggattccgccagcgtattaataaacagccgctggaacaggtacatggccggatagccaataatagaagagagtaaaaagacccaaagtcccatcaggccaacctggacaggaagaaaaacgatccctgcgccaatcgccatcccgatactcataatgacccaaccggtgtcggtactatcaaatttgatggcttcacgccattcgctttcagtcatccctgcccgacgcgccggggctgatgcgtcgaggattacgctggtattacttgccgattccataaaattctcgctcaatgtgtaggtagaggttttttttatttttcgtgccgcagcaaggcgatatgcagaacgtgaggtgcaggtactttcttgtaataagaaaatcatacgcgcacgataagagaaaaacttaccaataaaacgcctgcatttcttgtgggttaagaattcttttctatttactattggtttaatgttgttattttctctatttgacgcgtatcacaacaaaaaagggcgcactttggtgcgcccttttctcaacttctgtcttctacgttatcccatagcctgctcactctgcgcctgtcgggcctatccacaaacgactttaatcgccagaccgccgcgcgacgtctcgcgatatttgtcgttcatgtctttacccgtttcgtacatggtttcgattactttatcgagcgaaacccgcggttcagaggtacggcgtagcgccattcgcgccgcatttaccgctttaacggcgttaatcgcattacgttcaatacaagggatttgtacctgacccgccaccgggtcacaggtgaggccaaggttatgctccatcgcaatttccgccgcaatacagacctgcgccgggctgccgcccagcagttctgtcagccccgccgccgccatcgaacacgcgacgccaacctcgccctgacaccccacttccgcgccggatatcgaggcgttcatcttgtacagcataccaatcgcccccgccgacagcagataacgggcgatagagttggcattgaccggacgacggaatttgtcgtaataggccagcaccgcaggaataatgccgcacgcgccgttggtcggcgcggtgaccactcgcccgcccgccgcgttctcttcgctcacggccagggcgaacatgttcatccagtcaataacgttcatcggatcgcgggagagattatcgctggagaccagcagacgccgtaacgctaccgcgcggcgtggaacgttcagcggccccggcagcacgccctcagtattcatgccacgttcaattccggtcgccatcacctgccagatgcgggcaaagccagcgtcaatctgctctttgctccgcaacgccagttcattttgcatcatcaggccggaaaccgagagcccctgtctttcacacagcgtcaacagttcgctggcggaatgaaaatcatacggcaccgatttttctacatcgtgcgactgaccaaaacgctcctcttcgacaataaagccgccgccaatagagtaatacgttttgtgtaaaagcggcgcttgtccgttccaggcggtaatacgcataccgttttcatggcgcgccagggtttcagcgtgaaagaaaatactgtcggcgacgggaaaatccaccacatgcgcgccacccgccaccgataaacggctgctgcgggcaacctcctggataaacgccggaatgctatcaatattgacatcctgcggcgtattgcccgccaggcccataatgacggcggtatcggtcgcgtggcctttgcccgtcagcgatagcgatccgtaaagatcaaccgtgatgcgcgtcgttcgcggcaggtcgccgctgtcgatcagccgatcgataaaacattttcctgcattcattggccctacggtatgggagcttgaaggtccaatgccaatcttaaaaatatcaaatgcgctaatcatatctccccctaagattaccgttcagcgaagatccgtcgcggggcgatccacacgatcgccccgttcacgttacatcgcctgagtaaaggtgcgcgaaataacgtcctgttgctgttcacgcgtcagcgcattgaagcgcacggcatagccggaaacgcggatcgtcaggttcgggtagttttccggatgttcaatcgcatccagcaacatttcacggttcatgacattgacgttcagatgctgcccgccttctacctgtgcttcatgatggaaatagccgtccagcaggccgacaagattggttttccgcaccgcatcttctttcccgagcgccgcaggcacaatcgagaaggtgtacgaaataccgtctttggcgtaggtaaacggcagtttcgccaccgacgtcagcgaggccaccgcccctttgcggtcacgaccatgcatcgggttcgcccccggcgcgaacggcgttccggcgcggcgtccatccggcgtattgccggtcttctgcccgtacacgacgttcgaggtgatggtcaaaatggactgcgtcggcaccgcattgcgatacgtcggcaacacgctaattttttgcataaagcgtttcaccaggtcgcaggcgatgctgtccacgcgctcatcgttgttgccgtactgcggatactcgccttcaatagcaaagtcgatggcaaggccgttttcgtcgcggatcggcttcacctgagcgtacctgatggcggacagggaatccgccgccaccgacagtccggcgatgccgcacgccatcgtccgatacacatcacggtcgtgcagcgccatcagcgaagcttcatagctgtacttatcgtgcatgtagtgaatgatgttcagcgcgctaatgtactgcaccgccagccagtccataaaatggtcgagactctccattaccgcgtcataatccagcacctcatccgttaacggcgcggttttcggcccgacctggattttcagtttctcatcaacgccgccattgatagcgtacagcaacgttttggcaaggttggcgcgcgcgccgaagaactgcatctgcttaccgatgaccatcgggctgacgcaacaagcgatggcgtaatcgtcgctgttaaagtcggtacgcattaaatcgtcgttttcatactgcaaagatgaggtcacgatggagacctgcgcagcatatttcttgaatgccaccggcaacgcttctgaccacagtatggtcaggttcggctccggcgctggccccatcgtgtgcagggtatgcagataacggaaggagttcttcgtcaccagcgtgcggccatcaagccccatcccgccaataacttcggtggcccagatcggatcgccggaaaagagcgaatcaaattccggcgtgcgcaggaaacgcaccatgcggatcttcatgatgaaatggtcgatcagttcctgcgcctgctgctctgtcagaaggcccgcgttgaaatcgcgctcaatgtagatatcaaggaacgaggcggttcttcccagcgacattgcaccgccattttgcgattttaccgccgccagataagcgaagtagagccactgtaccgcttcctgcgcgttccgcgccgggcgggagatatcgtagccgtatttcgccgccatctcctgcatttgcagcagcgcgcgacgatgctccgccaactcctcacgcaggcgaatcgtcgcctcaagattctgtccctgctccagattcgactgcaggtcggcgaattgcagctcgcgttcgcgcaccagataacggatgccatacagcgcgacgcggcgataatcgccaataatgcgcccgcgaccataaccatccggcaaaccggttaatacgccggatttacggcagcgcagcatatccggcgagtaaacatcgaatacgccctgattatgggttttccgcaggtcggtaaaggtatattcaaaatcggcgtccatttcgcggccataagcgtggaatgaacttttgatcatgttaacgccgccaaacggatgcaaagcgcgtttaagcggcttatccgtttgtaaaccgacgattttttccagctctttttcaatataccccgcatcgtgcgcggtaatcgtcgtcgcgatgttggtatcgaaatccaccggcgcatgggtcgcgttctcgatacgtattcccgccatcaccttttcccacagcgccgtggtcgctggcgtcgcgtcggcgagaaaagattcatccccctcatagggcgtatagttatgctgaataaaatcacggacattaatttcttctttccagtccgtacctttaaaatcacgccatgcttcggcatacagcatatcgctggtatcgatatttaccttcatgaaaaataatctctctacagaacagccgttaagttatgcaaattccactggtgctttcacgttgcctaaatgaatggcatcaagggcaatcattttctcttcattcgtgggaataacagcgcaaataacctgagaagggttagcggaaataatgcgctcgccgtgagaattcggctgcttattcatttcaacgtctaacgtaagccccagtacgcccagatgttcaatgaccaactggcgaattaatactgaattttcaccaataccaccggtaaaaataatgccatccaaccgatgtaacgatgccgcgtgtccggcaatatgacgggcgatacggtgaacaaacgtttttatcgctaaccgggcgcgctcatgtccttcgtgccaggctttttccaggactctaaggtcggatgacaaaccggagatgccgagcaaaccggactctttattcaccactcgctccagatcgctcaacgtctgcccggtttctttggctatccacgccatcgcgccgaaatcaacgtcgccgctgcgagtccccatcatcagcccctcaagcggcgtcatccccattgaagtatccacgctctgaccattgcgtaccgcgcagatagacgccccattgcccagatgcgcgacaatcagacccgagtctttttcatcgaggtcaagcagttcatacgcgcgccgcgaaacatagcgatgcgacgtaccgtgaaagccgtagcgacgcacgcccaggctggaaaaatactcccacggcaatccgtataaataggcttccggcgccagcgtctggtggaaactggtatcaaataccgccacctgacgcacggccgggaaaagatgccgcgccgcgtcaatgccgcttaaattagcgtaattatgcagcggcgctaaaggcgatacccgacgaatattatcgataatctcatcggtaataatgacggactgcgtaaataactctccaccgtgcgcgatacggtgaccaattaatgccacgctatccgttaaatcacgtttttccagctcaaaggcaatggcttttaacgcgtcctcataattagagtgtgcgaggtttatcggcttatcgccattaatagataaaaaggcgttttcagtattcattccatctgctattcccgccattaaaacatcacaggtagcgacatccagtacagagaatttgatagaagatgatccgcaattaatgaccagaacgaccggaaattcattcatgtagtgcctccgtcgatgtcagcctgcgtccgcgccctggggcggacgcaggctaaacgtgaggattagaacaatttgtagacaatattcaggatggtcagcagaccaatcagggtgacgaacacgttatccagacgaccacggtacttcgccagcgacggcgctttacgaatggcgtacatcggcagcaggcataacagcgaggcgataatcggcgcgcccatcgcttcaatcaggtccagaatgttcgggtttgcgtaagctacgacccaggtagaccccataatgaagatcatgctgatggtgttaagcttgcccatagagactttggttttatcgcctttataaccaaatttcagcaccaggccgttcagcccttccagcgtccccaggtagtggccgaagaaagatttgaaaatagcaaccagcgcgatgatagacgcgccatactccagcaccgttgcaaaagtagattttgtccccgacaaagaggcgaaatggttggccaggtaggaaagtaccggaatgttctgcgctttcgcatccgccatgttctgcggggagagcgtaaacaggcagctaaaggcgaagaacatcaccacggcgaccatcagcatactggcgcgcgagatgatctgtgaacatttacgctcggtaaattcgcggccaaactctttctcatactcttcacgcttagacaccacgaaggaagagacgatgggcgaaaagttaaaggagaacaccatgatagagatgcccagccacaccgtaaccagtatgccatcgtgcccggtcagcgcgatattactgagatcaacctgatcgataaccgccgagttccagtaaggaatcagcgataatgagattagtaccagactggcgataaacggccataccaggtaactcatcaccttaaccatcagatctttaccaaaccagatcacaaaggccatcagcagcagcaagaacagcgccacgaaaccgcgattcaacgctggcatctgcagctggttttcccaaaacgtcatgaacgtgttagtaatggtgacgccataaatccacagcagcggacaaatcgcaaagaagtaaaggaacgtgataactaccccgcccgttttaccaaagtgctcttcgaccgtttccgtaatattgccggacggattagatccggataaacacagacgcgccagcgcccggtgacaatagaacgcaatggggtaagctaaaaccagcatcagaagaatggggataagcccgccaaacccggcgcggatagggaaaaacagcaccccggcgccgatggcggtaccaaataaacccagcgtccacgtcgtgtccgatttacgccatgacgactgttttgcctggctggatacaatgctatcagtagtactcatatcctatcctcacgaaaagattaagcgtcaactaaacccgtaatttgtgatacccgagaaagatcgatattgccgccagaaataatactgaccgtttttctgttctgaatatggctatctaatttcccacttaatagtgcggcgcaagccagagcgccagcgccttcagtaataaccttattgcgctgaattaaagcgatcatgctgttacgaatttcatcttcgctaaccaggacaatgtcatcgactaattcacgaacgatttcataggttaaattacccgggcgggagacatcacaaccatccgccagggtgccggtcgttcggtgcgtggttatttcgccagtgtaataagacgccgccataccgtgaacattttcggcctgtacgccgataactttaatggtcgggttaatcgatttaatcgcaatggcaatacctgcaattaaaccgccgccgccaataggcacgatgacattatcgacatcgtacagatcttccataatttccagaccaatagtgccctgtccggcaatgacttttggatcgtcgtaaggcggaataaaaatgcggccttcggtttcgacaatttcactcaccttagcgatggtgtcattgaagttgtcaccgtggagcaccacttccgccgaataatcacaggtggccgccacttttgactttggcgcgcccttcggcatcacgactttgccgtcaatacccagcattgcgcaagaaagagaaacgccctgtgcatgattacctgcggaacaggccacgacgcctttacgtttttccgcctccgttaacgagctaagtttgttaaaagcgccacgaattttaaatgaacccgtacgctgcatattttcaaacttgagaaatatttcgcctttgcaacgttcactaaaatagttagagcgaggcattcccgttttatatatcttccccgccagtctttttttcgcttcgaggatatcttcaattgcaaccgggagatcgtatgtaatgtgcattataacctcttaacctgggtattaaaaataagttaccgttgcccactgttcaaaagaaacaggtgacgtcaatttcgctaaatatgtttattccatatcattcaatttctattaactgcctgcgtctgcatccattatatgatgaatattgtttagccaattctactaatactgaagcggcttttttgatacgataatttttagaccataccgccgcataacgtgcgacgggtaacgtgtcttgtatgggtatcgtgataaattgattagagccaaaaggcgtggtcatatcgcagggaataacagttaagaaatcagcattgagaacaagattatatattgtgacgacggaatctgttttaacaatgttttcgatgctgatgccatttcgttgtagagtggtgagtaattcgctgtagtagcccatattcgtttgcggcaacacccactgttcgtcttttaacgattccagtgtgatggtgccggtgcatgttcgggacttgctggctaccaggacaaactctgattcaaacagcggctcgacatgcagatcctgtagctgcatttcattactgagcgtaccgatagcaaagtccagccgcccgtcgcgcagggccggcagaaatgaagagagctgggcttcgtacatggatacctgcgcttttggaaagacctctttgaacttatgaatcatatcggacatgaaggtaaagccaatcagcgaaggaaagccaaacgagacgtcgacaacggtattgcacgtcatactgttcatctcgttgatcatgtttttcatttcgcgggtgatagattcagaccaggaaagcagtacctgtcccgcttcggtcaacgtaacgccggtatttttacgtacaattagctcaacgccaaaataggcctcaacatcgctaatgattttactgacggcgggttgggttaaccctaacgattttgcggcagaaccgatagaaccacttctaatgacttcctgaaagaccaccaaatgctgtgttttagggagaacaagagtattcatatctaccgctctgaaataacattgtgaacggcaggaagtgtagcaaattaaatcttaaaggttatgtgcgaccactcacaaattaacttaccacaatttttacatggtttttattaaataaagaaaacctgatatttcaataggttacaaaaataaagcagtaacttagcctgatttcaatcaaaaaacaggggcgggataacgatatattatggcgataaccagcctattttatctcctatttttgatatcccatgaagacgatatttcaatcaattacgggacattttatcgacaattccagcgttaaatttaaaacgtaatttctcaaatttaagtataaaccgaaggtaaatgcgcttaaaaaccgttacgcgtcacatttttttaccttatttgtttgcaaagaaacatttaataaaattttaaccaaaatatttcatacatttaattttcatttaaaacaaataatttacaccgctttcttgctgtttttcaggatgtaattttgtgaaagaaatcgattgcttttcacttcaactaaaaatagcgcaatacatagcgttttgtgtttctcatcacaaaaacgaataatattatgtcaccacggctgtcaattaattgccggatggtgacgctggcgtcttctgcaacctctatacccttcaccggcctgataagcaaaaacccgccgaagcggattttatgaagaggtgaaactgaccgataagccgctttctttcgggtatagcgtcgtggacagtcattcatcctgtcgccctgtaaaagcaaaaacccgccagcttacactgacggggtttatgaagagatgaaactgaccgataagccgctttctttcgggtatagcgtcgtggacagtcattcatcctgccgccctgtaaaagcaaaaacccgccagcttacactgacgggttttatgaagaggtgaaactgaccgataagccgctttctttcgggtatagcgtcgtggacagtcattcatcctgccgccctgtaaaagcaaaaacccgccagcttacactgacgggttttatgaagagatgatactgaccgataagccgctttcttttgggtatagcgtcgtggacagtcattcatcctgtcgcccggtaaaagcaaaaacccgccagcttacactgacgggttttatgaagagatgatactgaccgataagccgctttcttttggacatagcgtcgtggacagtcattcatcctgccgccctgtaaaagcaaaaacccgccgaagcgggttttatgaagaggtgaaactgaccgataagccgctttcttttggatatagcgtcgtggacagtcattcatcctgccgccctgtaaaagcaaaaacccgccgaagcgggttttatgaagaagtgaaactgaccgataagccgggttctgtcgtggacagtcattcatctaggccagcaatcgctcactggctcaagcagcctacccgggttcagtacgggccgtaccttatgaacccctatttggccttgctccgggtggagtttaccgtgccacggactgttaccagccgcgcggtgcgctcttaccgcaccctttcacccttacctgatcccacttacgtgggccatcggcggtttgctctctgttgcactggtcgtgggtttcccccccaggcgttacctggcaccctgccctatggagcccggactttcctcccctccgcccgtctccccgaaaggacgacgacgaagcggcgactgtctggtcagcttcggcgcgcagtatagtgggttcgcgcgactttgtcaccctgcgctgcgcattcctatcgccagagcggcagcaacatttctggatgcccgataaatattgtcaaaagcgccccgaaaagcctcctccagcgtcacgatgcgcgtgagtacgctaaagacagcgtcgatgccataatgatgtactatccctacatcgtgcgtcaggctgccggcaatgccaattactggcttatgatattttttcgccacatttgcgacgccaatcggcactttaccgcgaatactttggctatcaatccgcccttctcccgtcaccaccagcgtacagtcgtggatatgctcctccaggttcagtgccgccgtgacaatttcgatcccgctgcgtaattccgcaccgagaaaagccattaacgccgcccccataccgcctgccgcgcctgcgccgggtgccgtctttacgtcgacattcagcgatttttttatgatgtcggcatagtgagcaagatttctgtccagctcaacaatgttctcttcggtcgcgcctttctgcggcccaaaaattcgtgatgcgccgttgtcgccgatcagaggattagagacatcgcaagcgacacgaatcgcgcagagttttaaacggggatcgagctctgaaatatcaatgtcgcttagacaatgaaggcttccgccaccgtaaccgatatccgcgccgtttgcatcgcgcagttttgcgcctaacgcctgcatcatccctgcgccgccgtcatttgtcgcgctgccgccaatgccgataatgatattgcttgcgccgctttccagcgcctgcaatatcagctcccccgttccccgcgaggttgtaatcaaagggttgcgtttttctggcggaaccagcgccagtccgctggccgccgccatttcaataaacgcggttttaccatccccggacattccccagcaggctttcactttttcacccaacggcccggtcacccatgcggcgcgttcaacgccctgcgtcgcggcaatcatggcttcgaccgttccttcgccgccatcggcaaccggaacagagacatattgcgcatcggggaaaatttcccgaaatcctttttctatcgcctgcgctacctcggcggcagaaaggctttctttataggagtcgggggcaattacgattttcatagtggtagcctgttactgcacaacgccggatggcgtttcacttatccagtctgaaattcaggcccggatcgctacacgccatccgggcacaacgtcgttagcgagtgacttccactttcgccagtttttcgtagtagcacgccagcgcgctatggtcgtcattaccgtgtccatccgcgcgtaacgcctgcatcatttccataacggcggcggtcagcgggagctgcgcgccaacgccgtgggaggtatccagcgcattcgccagatctttaatgtgcagatcgatacggaaacctggcttaaagtttcggtccatgaccatcggcgctttcgcatccagtaccgtgctgccagccagaccgccgcgaatcgcctgatagaccagatccgggttgacgcccgctttagtcgccagcgtcagcgcttcagacatggcggcgatattcaacgccacgatcacctggttagccagttttgtgacgttgcctgcgccgatatcgccggtatgcaccacggaacccgccatcgctttcatcaggtcgtagtacttgtcgaaaatggctttatcgccccccaccatcaccgacagcgtgccatcaatcgccttcggctcgccgccgctgaccggcgcatccaacatctcaacgcccttcgccttcagcgcatcgctgatttcacggcttgccagcggcgcgatagaactcatatcaatcaatacggttcctggcttcgcgccttcgatgataccgttctcgcccagcgcaacctctttcacatgcggagagttaggcagcatcgtgatgatgacgtcacactgttcagcgatcgccttcgccgtagaggccgtttccgcgcctgcggcaatgacgtcagcaatcgcttcaggattacgatcggacaccaccagcgaataccctgcttttagtaagtttttgctcatgggcttacccatgatgcctaagccaataaagccaactttcatcgtcatagcgttctctctttccataccaggattattttttaaaggtgtcggcaagcttctgcgtgctggcgcggaatgcgcctaaatcgctgccaacggcgacaaaggtcgcgccccattccagataacggcgggcatccgcctctaccggcgccagaatgccgcacggtttaccgtgcgctttagcgcgggcgaaaatatgttgaatcgtctgctgcacgtcagggtgagaagcattgccgagatgacccagcgcggcggccaaatcgcttgggccgacaaaaatgccatcaacgccttccgttgcggcgatggcatcaacattgtcgacacccaactggctttcgatttgaacaataatggtgatgtttttgttcgactgcgcaaagtaatcaggcaccgtaccgaacatattcgcgcggtgagaaacggagacgccgcgaatgccttccggcgggtaacgcgtcgaggcgacggcgcgagccgcttcctcttgcgtttcaacaaaggggatcaggaagttataaaacccaatatccagcatccgtttgataatgaccggttcattggttggcacacgtaccacaggcgcgctggcgctgcctttcaatgccattagctgcggaattaaggtggtcacatcgttcggcgcatgttcgccatccagcaccagccagtcaaatcccgccagaccgagaacttcggtggtgattgggcttgccagtgcagaccagcagccaatctgcacctgttgcgccgctagcgccgctttaaacttattcgggaaaatagcgttattcatcgcttataccttcgcttatttctttaattctctacatgtgatgccgccaccataacttatagcaacgacaataaaatgcttatctgaaatcagaatgggtctccgcattctatttctaatgtggtacacatcctgtagcacaatataccgttctgatatctttatcgtcttttattattatcatggtattttcaaataactcgtcagatacactgaattcgccattcagtataaacagcctatggcggataatcattgtgcaaacgctcattaaaaagggattatttaacgcttatttttgagcatacgcccatgatactgggcgctaatgcacacatttacgctttacccggcctacataaaaaatttcataatttgcggtgatctggatcacattcttatatttatactcctgtcattcttatttcattatgcatgaactttatttcttatattgagatttaacgatttaaccataaccaaaatagataatcctatttctatcatccaggctggagaatgttgaacaatggccaatatcgaaattcgccaggaatcgccatcggcgttttatataaaagtacatgaaaccgataatgtcgcaattattgttaatgaccacggtcttaaagccggaacacgttttccggatggcctggaactgactgaacatattccgcaaggccataaagttgctctgacggatatccccgctcacggcgaaatcatccgttatggcgaagtcatcggttatgcggtacgcgacatcccgcgcggaagctggatcgacgagtcgctggttgaactgccaaaagcgccgccgctgaatacgctaccgctggcgaccaaagtaccggaaccgctgccgccgctggaaggctatacgtttgagggctatcgtaacgccgatggcagcgtcggcaccaaaaatctgcttggcattaccaccagcgtgcactgtgtggcgggcgtggtcgattatgtggtgaaagtgattgagcgcgatctcctgcccaaatacccgaatgtcgatggcgttgtagggctaaaccatctgtacggctgcggcgtggcaatcaacgcgccggcggcggtcgtgccgattcgcacgattcataatatcgcgctcaaccccaattttggcggcgaagtgatggtgattggcctcggttgcgaaaaactgcagccggaacggctgctggaaggcaccgaggatgttcccgccatcgccgttgaaagcgccagtattgtgcgtttacaggacgagcagcatgtcggctttaaatcaatggtcgacgatattttgcgggtcgccgaacgccatctgacgaaactgaaccagcgccagcgcgaaacctgcccggcctccgagctggtcgtcgggatgcaatgcggcggcagcgatgcgttttctggcgtcacggcaaacccggcggtgggttatgcttccgatctgctggtacgctgcggcgcgaccgtcatgttctcggaggtcaccgaagtgcgcgatgccattcatcttctgacgccgcgcgccatcaacgaagccgtgggtaaacgcctactggatgaaatggcctggtacgataactaccttgatatggggaaaaccgatcgcagcgctaacccgtcccccggcaacaaaaaaggcggcctggcgaacgtcgtggaaaaagcgctgggctctatcgctaaatcgggtaagagcgccattgtcgaagtattgtcgccgggccagcgccccaccaaacgcggcctgatttacgccgcgacgcccgccagcgatttcgtctgcggcacgcagcaggtcgcttccggcattaccgtacaggtctttaccaccggacgcggcacgccgtacgggctgatggcggtgccggtcattaaaatggcgacgcgtaccgagctggcgaaccgctggtatgacttaatggatatcaatgcaggcaccatcgccacgggtgaagagacaatcgaagatgtgggctggaagctatttcactttattctcgatgtcgccagcggccggaaaaagactttctcagatcaatggggattgcataaccagctggcagtgtttaaccccgcacctgtgacctgatctattctggaaagcgcctcgcaaaacatggcttaagggccatgttttcatatgtttgataaactgcgccatgttcataccggatatggcaaaaacacctaacccaccataaaaccattcaaattcaataaattgaaattctatgccaagcgcaaccttacgtttctcactaatttgagtcgcagcacatgcaatttgaggtatgtcgaatataacgacagcctattaatcacctttacttaattctgctgcctcatcaattctttaatttgtgccagcgtggacgtgccttccatcggcccacgcgcagagatagccagcgatcctgcggcattagcatgggctaaagcatcgggtacggaatatcccgcaagaaacaggctgacaaaggttgcgccaaagcaatcgccagcgcctgtaggatcaaccaccttcaccggatacccagccacatgatgttgttcgtcttttgaatagtaactggctccacgggcgccacgtttaatgatgacatgggcaattccacgcttgtgaagccttgcgacaattttctcttcatcgcgggatttgctcaggccgaaataatccagttcgccatcgcttggcaggaagaaatccgtgtaatcaagaatatattcaaaggcctgcgacatttcgcggatctttagcatctctttacggatattaggatcgaaagaaattgtgccaccattttcttttacaatgctaatcgccttgcgtacggcatcgatcaaacgaaaggaaaataatgacgatcccataatatgaaagtggcgatattgcctgagtaatgtttcatcaaggtggtcggcactcagcaaaccgcacgcactgtccggcatgttgaaaataaaatctcgctgggcctggcttcggtagctgacaaaagcactacctgttgtggcgttcggcagtacggaaattccctgtacatttacgccatcgcgcgacaatcgggtaatattcataacgccaaaggcatcgttgccaacacagctaaacaacaatgaacgaaaaccaagtttagcaacctgatcggcaaatatggcaggcgccccactgggatacggcccccaaaattcccccggtgaggaaaatccctggttctctttttttgccagaaactcgacgagcaattcacccaatgttgcgattgttatgttcatgcgttgtccttcatcttgcctgatgcagggtcgggtttatccaggtcagacattcgttattggtatagctgttggttaagccgtcggccagaaaccgtgagtggtactcagcggcgacaatctgtggcgtaataatcgcgctcagcgtattcagttttcctaccggataacgcgccacatcatgaatcggacgctgcgccaccacggcaatactctgtccactaaggcgcaggcattcacttagcaaagcagctgcactttcgtttttcacgttgagcgtgccatcctcgctgatatggtccaccatcaccagacaacatgacggttgaaattgttgcaaagattggatggcgatttcgccccccaacgcctgaccactatgccccagtacaccgcccaacaacacaatttcaccatcgatataatcacgggccggtgcaacatggctaagatcgttgatgataaggcacagatcccgataatcgcccaggaaaggaagcgctttacgcaacacctctccggcccccagaaacacggtatcgtcgtcgcagaccagacgggcaacttgcttagccagttcaagctctacgctatgctctaacgcctgcgactgcaccacttcatggcttaccgctgctctgacgggttgggccgtgtaaatcgctccgccaaaggagcgtttcagatagccttgctgctccaggtaattgagatcattacggatcgttacccctgaaaccgataacatttcagccaaatcgtctacttttatttcgccgtttttacggacgatttcggcaatgtccagacgccttttcaacaggctggtagatggttttgccacaacataccctttttttccgcttcgtcgggaagttatcccgtgctttaactttcatttttaaacttctgacaggggatgtcaattttgcaccacgtcaccgaatgctcaatggaaaacatcacaataaaatcaagtaattatagaattttcatatcttccatttacttacaaaacaaaatttaaatccacactttttctttcatttaagaaaaattatcctgcttttgtgttgatgatcacaatcatgtgtggcaatgatcgttacattactttcaaaacgaaggttatttttattttaaactttaatttcgaaagttataaacggagaccactatgttcattatttccagtaaaaatatgctccagaaggcccagcatgcaggctatgccgtgccagcctttaacatccataacctggaaaccttgcaggtggtggtagaaaccgccgcagaaatgcgctcaccgctgatcgttgccggaacaccaggcacgtttagctatgccggaatgggtaacattgtggcgatcgcgggcgatctggctcgtgaatacaatctgccactggccattcatctggatcatcatgaatcgttagccgatattgaaagcaaagttatggcagggatccgttcagtcatgatcgatggttcccactttccctttgaagagaatgtggcgctggtgaaaagcgtggtcgatttttgccatcgctacgacaccagcgtggaggcagaactgggccgccttggtgggatcgaagatgatttagtggtagacagcaaagatgccctttacaccaatccacagcaagcacgtgagtttgtggcgcgcaccggcattgattcgctggcggttgctatcggcacggcacacggcatgtatgccgctgaacctaaacttgattttgagcgactggcagaaatacgcgctctggtggatatccctctggtattgcatggggcatctggtttgccggaaagcgatattcgccaggccatcagccttggggtatgcaaagtcaatgttgccaccgaactgaaaatcgccttctccgacgccttaaaagagtatttcctacaaaacccgaaagccaatgatccccgccactatatgcaaccagcaaaacaggcgatgaaagaggtggtacgcaaagtaattcatgtttgcggctgtgaagggcaactgtgaggaatcgcctgtgatctacacgctaacacttaatagcgcgattgatatgaatatatttagcgatcctttacagccaaatattgtcaatcgcactcaccacaccgagttttgcccaaatggtaaaggggtaaatgttgcgctggttctggatcactttcaaatacctgcgcatatattaggcatttttggtggtttcaccgggcattatattgtagaaagcctgcgtacccgaaaaatgccagtcacaccagcatgggtagaagaacccacgcggattaatattttcattcatgacggtaagcaggaatataaactggtcaaccctggctcatatattccagatgaatgtaaacaacaaattatcacgattatttcgcaactgcccgatgcagactatctggtgataagcggcagcctgccacaaggtattgaaagccgcttttacgcagaaatcatgcatatttgtcagcaaaaaaatatcggcgtaattttagatattagtcatccgtcattacgtcagttactggagttcaaaccgttattaattaaaccaaatgatgaagaggttaaagcaatattcggtttaactgtctctgacgacaatgatgcgaaaaatactctaaccactttacatgcacttggtgcacaaaatgttctgctaacccttggcgctaaaggaatgtatttctccaatgggattgattactggttttgtagcgcgccaacggttgatttggtgagctccgcctgtgcaggcgatgctgcactggccgcctttctcagccagtggttatctacaggagaagtggaatatgccttatctcttgccagtgcaacaggagctgatgtcgcaagttctgccggactaggccaacttgcggcaatagaaaccttactttcgcaaatccacgtcagaaagctgtaggttaaattacaatataaggtctgcttatgaaaaagatcattgcagtgaccggctgccctaccggtattgcgcatacatttatggctgaagaagccttaaaaaatgccgcgaaaaaattatctgttgaaataaaagttgaaaccaatggtgccagtggcgttgaaaatgctattcaacctgctgatctggtagatattgccggagtcattattgcggcggataaagatgtcttacctgatcgctttaatggtttaccggttattgaagtaccggtaaaagaagcaatccatcatcctgcggagctgattaacaaagttattaatggtgaagccccaatacgtaaaggcgaatcaaccaccagcacggaaattatcgaaaaagaatcactggggcgacaaatttataagcacctgatgagtggtgtttcaaatatgctaccttttgtagttgccggaggcatattaattgcggtgtcgtttttatgggggatttattccgctgatcctaattcagctgaatacaatgcaaccgccgcaatgctaatgaaaatcggtcagcaagccttttcgattatggttccggtctttaccgcttatattgcattctctatttctggcagaccagggatggtggctggatttgtcggcggcttactggcaaatgctaccggcgcaggatttcttggtgggataattgccggattcgccgtcattgccattatctatctggccggcgtactgctgacctggcgtcgcgcccgacagtttgtcgcggctgagaaagccacggcgctacagcaaagtcaaatcgcctcttaattttaggggagcaatcgctcccctcaccttcctggagaatgttatgaaatcagtggttattcacgctgagggagacgtgcgcgttgaagaacgtcccttaccacaactgcaagccgaggacgatgtgttggtcaaggtcgttagctcagggctttgcgggtcggatatcccgcgtattttcgcgcagggcgcccattattatcctattacgttaggtcatgaattcagcggctacgttgaatcctacggcacaggcgtaacggatatgcagcccggcgatgccgtcgcttgtgtcccgcttcttccctgctttcactgtccgcaatgcgaacgcggttacttttctttatgcaaacagtatcagtttgtaggatcgcgcagcgaaggcggtaatgcggaatatgtggtggtcaaacgggccaatcttttccgcttgccttctgatatgccgattgaagatggcgcgtttatcgaaccgattaccgtgggcttacacgcctttcatctggcgcagggctgcgaggggaaaaacgtaattatcgtcggtgccgggacaattggcctgctggccttacagtgcgcgcgggaactgggcgcgcgaagcgtaacggcgattgatatcaatccgcagaaactggaactggcgaaagcgctcggcgcaacgcatacctgtaatagccgggaaatgaccgccgacgacatccagaccgcgttgtccgacattcagtttgatcaactggttctcgaaacggcaggaactccccagaccgtctcgctggctatcgatatcgccgggccgcgcgcgcaactggcgctggtggggacgttacatcacgatctcaccctgacaacgcgtacattcgggctaattttgcgtaaagagctcacgctcctcggcagttggatgaactactccgcgccatggccaggagaagaatgggaaaccgcagcgcgcctgttggctgaaaaacgtcttcaactgacccctctcattgcccatcgcggcgatgcggaaagctttgcagaagcagtcaaagcgcttaatggcgcgcccatgcagggcaaaattttacttcaactttcctgatggtacgagccagcaacctgcgctggctcacatttcctttcgaaatttagcgttcacctttcgcaatccttcgtttaaactagttacagttaattatcaggcaaatcaatatgaactcatttgagcgaagaaataaaattgtcgacctgattaatacgcaaggcagcgtgctggtgatggacctttcaaatacctttggtatttctgaagtgactatccgtgctgacctgcgtctgctggaagagaaaggccttgtcacccgttttcatggcggcgcggcaaaaccgggaagtcatctggcggaaggcgacaatcaggaagtcattctggaagatcggtatcaactcgccagcgatccgaaaaagcggattgcccaggcggctgcggcaatggttgaagaaggaatgaccatcattctggatagcgggagcacaacattactgattgcggaagcgctcgcgcgaaaaagcaatattacggtgatcactaacagcttgcctgccgcttttacgctatcagaaaataaagatctcacgctggtggtctgcggcggtacggtacggcataaaacccactcaatgcacggcacgattgcggaacgatcgctacacggcatcagcgccgatttaatgtttgtcggggcggatggcattgatgcgacaaacggtattaccacgtttaacgaaggttattccattagcggcgtcatggcggcggcggcacacaaagttatcgcggtactggacgcgaccaaatttaaccgtcgcggctttaaccaggtattgccgatggacaagatcgactgtgtgataaccgatgacaccatcagcaaacaggataaagcggcattagcgaaaacaggcgtggaattaatgatcgtctaaaaaggagtcggttatgcgttgctgatcgcgagagtaagcccgaaggaaaggtccggcccgctatcaccgcccaatgcccccatcaatttacccacatcaatcacctgattgagtattaacacgatggcgataaaaggcggttcccgggcgctcgcttttattcttcctgctgctccagcgcatacttatacagcgcatttttcttcacgccgtgaatttctgctgccagcgccgccgcttttttcagcggcagttctgcctgtagcagcgccagcgtgcgcagcgcgtcggcgggcaggtcgtcttcttgcgctttatggccttcgacaatcagcaccatttcgcctttgcgacggttttcatcttctttgacccacgccagcagctcgccgaccggcgcgccgtgaatggtttcccaggttttggtcagctcacgcgccagcaccacataacgggattctcccaataccgcgacgatatcttccaggctatctaacaggcggtgggttgactcataaaaaatcagcgttcgcggttccgtttcaatggcttttagcgcatcacggcggcctttggatttcgccggtaaaaagccttcatagcagaaacggtcggatggcaggccagcggcgctcagggcggcaatcgccgcacacggccccggtagcggcaccacgcgaatccccgcttcgcgacaagtacgcaccaggtggtagcccggatcgttaatcagcggcgtaccggcgtcggaaaccagcgcaatgttctgcccttcttttagcttcgcgaccagcgtttccgctttttgttgttcgttatggtcgtgcagcgcgaacaaccgggcattaatcccaaaatgttgcagcaataaaccggtgtgacgagtatcttcggcggcaatcagatctacagcctgtaacacctccaacgcacgctgggtaatatccgccagattaccgataggagtaggtacaataaagagttggccctgagaattatccgccgattcgttttgtttcattgtgtcgtccgtattgccgatttaatattgagcattgcgtaaaaaaatatcactggatacagtatggtaccctcaacattttctcgtttgaacgccgcacgcgcgctgcctgtcgtcctggctgcgctacttttcgccgggtgcggcacccaggcgccagatcaaagcgcagcctatatgcagggttcagcgcaagctgactccgccttttacctgcatcagatgcagcaaagcgcagatgatagcaagaccaactggcaattactcgccattcatgcactgctgaaagaaggaaaaagccagcaggccgtcgacctgttcaaccaactcccgcaaaatctgaacgatacccagcgtcgcgaacagtctttattagcggtagaaatcaaactggcgcaaaaagatgtcgcaggcgcgcaggccttgctggataaactaaaacccgccgactttgcgccaaatcaacaagcgcgttactggcaggcgcagatcgttgccagccagggacgcccgtcgcttaccctgttgcgggcgttaatcgcccaggaaccgctactggcggcgaaagataaacaaaaaaatatcgacgccacctggcaggcgctctccgccatgacgccggatcaggccaggacgttagttatcaacgctgatgaaaatgtgcttcagggctggctggatctgcaacgcgtctggtttgacaaccgcaacgatccagacatgctgaaagctgggatcgccgactggcaaaaacgctacccgcaaaatccgggggcgaaaatgctgccgacgcagctcgtcaatgtacaacgtttcaaaccggcttccaccagcaaaatcgctctgctgctgccgctgaacggtcaggctgccgtgtttggccgtaccatccagcaaggtttcgaagccgcgaaaaacctcggcacccaggcggtggagatgcagcctgccgccgctcctgacgcgccggtcgaacctggcgtggaggagacgcaaccacaaatgaccaacggcgtcgccagtccgtcgcaggcctcggtgagcgatctgactgatgacgctccagcccagtccgctacgccagtcagcgcgccacaaactccccctgctacagcaagcgcgccggcggatccctccgctgaattaaaaatctacgatacctcttcccagccgttggatcaggtgcttgctcaggttcagcaagacggcgccagtatcgtggtcgggccgctgttgaaaaacaatgtggaagcgctgatgaaaagcaacacgccgctcaacgtgctggcgctcaaccagccggaaacggtacgtagcttccctaatatctgctatttcgcgctctctccagaagatgaagcccgtgacgcggcgcatcatatttatgaccagggcaagcagtcgccgctgctgttgattccacgcagcgcgcttggcgatcgcgtggcgaacgccttcacccaggagtggcaaaaactgggcggcggcatcgtgttacagcaaaaattcggctccgtagccgagctgaaaatgggcgtgaacggcggcgcgggtatcgcgttgactggcagtccagtcgccgccagcgtgcctgcgcagcctggcgtcaccattggcggtctgaccatccctgcgccgccgaccgacgcgcaaatcaccggcggcggacgcgtagacgcggtctatattctggctacgccggaagagattggctttatcaaaccgatgatcgccatgcgtaacggcacccagagcggcgcgacgctgtatgccagctctcgcagcgcgcaaggcacctccggccccgacttccgtctggaaatggagggtttacaatacagtgaaattcctatgctggcaggcggcaatatgccgttgatgcagcaggcgctgagcgctgtacataacgactattctctggcgcggatgtacgccatgggcgtggatgcctggacgctggcgaaccacttttcgcagatgcgtcaggtgcaggggtttgagatcaatggcaataccggcgcattaaccgccagcccggattgtgtgattaacaggaagttatcatggctcaaataccagcaaggggagattgttcccgccagctaacgcgtaaacaggctggcgacgcgtgggaagctgccgcgcgtcgctggctggaaagcaaaggactgcggtttatcgccgccaacgtgcgcgagcgcggcggcgaaatcgatctgatcatgcgcgacggaaaaacgacggtttttgttgaggtccgctatcggcgctccgggctttatggcggcgcggcggctagtgtgacccgcagcaagcaacacaaattattacatactgcccgcttgtggctcgcccgccagaatgggagttttgatactgtggattgtcggttcgatgtgttagccttcaccggaaatgagattgagtggtttcgggatgcgtttaacgaccactcataattgaagattttaaggattagcgtgctcgaaagaatcaaagtttgctttacagaaagcattcaaactcaaattgctgcggcggaagcgcttccggatgccatttcccgcgccgccatgacgctggttcattccctgcttaacggcaacaaaatcctctgttgtggaaacgggacgtccgcggccaacgcacagcattttgctgccagcatgattaaccgctttgaaacggagcgacccagtttacccgccattgcactaaataccgataatgtggtcttaactgcgatcgctaacgatcgcttgcacgatgaagtttatgcaaaacaagtccgggcgctgggacatgcaggcgatgttttattggcgatctctacgcgtggtaatagtcgcgatatcgtaaaagccgttgaagcagccgtcacacgtgacatgaccattgtggcgctaaccgggtatgacgggggtgagctggccggactattagggccgcaggatgtcgaaattcgtatcccttcacaccacagcgcgcgcattcaggaaatgcatatgctgacggtaaactgcctgtgcgatttgatcgataacacgctttttcctcaccaggatgattaaggagtacacatgaaggcattttcgccgctcgcagtccttatttctgcgttgctattgcaaggttgcgtcgccgccgcggtagtgggtacggcagccgtcggtaccaaagccgcaaccgacccgcgtagcgtgggcacccaggtggatgacggaacgctggaactgcgtgtcagcagcgcgctgtcgaaagatgagcaaatcaaaaaagagacgcgcatcaatgtcacggcttatcagggcaaagttttgttagtgggccagtcgccaaacagcgaactctccgcacgcgctaaacagatagcgatgggcgttgaaggcaccaccgaggtctataacgagattcgccagggtcagcctatcggcctggggaccgcctctaacgatacctggatcaccacgaaagttcgctcacagctactgaccagcgatcaggtaaaatcgtcaaacgtgaaagtcaccaccgagaatggcgaagtgttcctgctgggcctggtgactgaacgtgaaggtaaagcggcagcagacatcgccagccgggtgagcggcgtgaaacgcgtgaccaccgcctttacgtatattaagtaaccggtgtgccgggtggcgataagaatgtgtaaaccgcgtcgccatccggtaaatcatccggcttcgctactccgctttttcccgcagttgcgatgaggtcagaatcgtcacgccttcttgtgctggcgccagcgcttccgccagcatggcccgcgccacatcccgcgcatcgatcgatttccagtttcctggcaacagccggaatagcggagcgaaaagcgtttcattcacccgccgcgttgttctgtcgccgagcagcatagaaggtcgggcaatcgtcaaacgaggccaattttgcgcgattaacgcctcctccatttctcctttcacccgattgtagaaaaacggagagtgcgcgtttgctcccattgcgctgaccaccaccatgtgctgcgcacccagtcgacgtccggtcagcgcagtatcaaccaccagcgtataatccgcatgaataaacgccgctttacttcccgcttcacgccgggtcgtgcccaggcagcaaaaaacaatatctaccgggtcggtcacctgagctaacgcatcggtaagctgcggatcgtgagggttataaacgccgacaatatccgtcagcgggcgacgcgtcggcgcggcgatagcgctcacctgcggcgtgttgattaacattctcagcagatgtccgccgaccagtccggtcgcgccggtaatcagtacctgactcatcctcgctcctttacagatttgtccaccttgcactctcggccctatcgaccaggcttaatagtctacgaggtaagtatccatcattgtggaaaatttgccttacccgacgccaccactgcggaggaaacgcatgagtaagaaaattgccgttttgattaccgatgaatttgaagattcagaatttacctcgccggcagcagaattccgtcaggccggccatgaggtcatcaccatcgaaaaagaggcgggtaaaacggtgaaaggaaaaaaaggcgaggccagcgtcaccattgataaggctattgatgacgttcgtcccgacgagttcgacgccttgctattgccgggaggtcattcgccggactacctgcgcggcgacagccgtttcgtggattttacccgcgatttcgttaacagcggtaaaccggtttttgccatttgccacggcccgcagttgttgatcagcgccgatgtcattcgtggccgcaaactcacggcggtgaaaccgattattatcgatgtgaagaacgcgggcgcggaattttacgatcaggaagtcgtcgtcgataaagatcagctggtgaccagccgcacgcctgacgacctgccggcatttaaccgcgaggcgctacgcctgctgggcgcgtgagtcacgtaaccagtgcagttttttaccaaaccccagcgtgttgtcggtgaatttaatttcatccagccggatttcccataccggcgctggcagcaccctggcgaccgggaagcgacgaaggtaagctttacgcgcggcgtcgctctcctgcccctccagacggcgaatttcccctttaaactgcacgccgcgaatgcgcgccaccgttttcggctgcccattgaccgttcccgcaactggcgcgcacgcgccggacatttgcgcatggcgggttttatcatccgttaacagatacagtgcgacgttttgcgcatcgaacaaataaaacgcattggcgcaccacagctctccctcatggtgtacgcaccaggtcaccacgtgttgtttcgccagccaacggccaatagcggtaagtgtgtccatctttattctcgcttatactgggaacctgaaaattatcatgctgatggcgacaatgaccccctggtatctgtatctgattcgtactgcagacaatgcgctttacaccggaataaccaccgatgtggcgcgtcgttacaggcagcatcaaacgggaaaaggcgcaaaagcattacggggaaaaggcgagttaacgctggcgtttgcggcgcaggtcggcgatcgctcgctggccctgcgcatagagtatcgcatcaaacagctcacaaagcgccagaaagagcgccttgtgacggaacgcgaagcgtttgaggcgctgctgtccagcctgcaaacgccggtgcttaaaaacgattgaagtggtcgtgatactccaccagccccgtcacgccctccagcgcatcctcagccaaacggtgtacctggaaagcgctttccgtaccgggccaacggcagtgaagatcgtaatgtgcggccagttcaaaaccgaagcggctatataacgccggatcgcccagcgtcacgaccgccgcgtagccgaactcgttgagcgaatccagcccttcatacactaactggcgcgccagcccttgcccgcgatacttttcatcgaccgccagcggcgccatgccgacccactgtaaatcttcgccctgcacatcaaccgggctaaaggcgacatagcccaccacctgaccttcatcatccgtggccaccagtccgagcgtcagaaaaccatcttcacgcaaatcgtgaaccagcttcgcttccgcatcgctttcgaatgaacggcgtaacagcgcatcaataccaggcgcatcaataggaatttctactcgaattagcatggttcacctaccgaggtctgtttggtttccggcgagtttttcattcccgcctcaacaaaatccgccagttgcagcagcataacgcgtaacgctttcggcatctgctccagttcgatggcgtccatcagattcttcacatacaaccctaactcagtatcgccttcaatgaccagtcgacgctggaaaaagagcgtatccggatcctgtttacgggcggcgatcattagcagatcgctggcgtcggcgctaaaactgacgtcagcatccgcctgctggctaacgatcagcttttcattttcaaccgtggtataccattttaagtcgatgtcacgaacatgaatgcttaaccaacgaccttcgaggaattccagctctccatcggccagcgcctgacgaaactgccagctcagaacctgttccagaacctggcgctttagcgcaaagggcgtcagtttaaccggtacactcatcagagacgggccagcatggactaagcgtgaacgcagtttatctaacacgagctttactccctgtttcaatagtcctgttattttgccatatccaataaatcacatggcggcgtaaatcaacaattgggtctgattttctaccccattattggtgttaccaatacgcctttaactgccttaaatcaaaaattgtcgcagcaaggttaactaaaatccctgttcgttaacaattttgcgtctcagacgtaaccctcaggataaattatggagctgctctgccctgccggaaatctcccggcgctgaaggcggccatcgaaaacggcgctgacgccgtttatatcgggttaaaagacgataccaatgcccgtcattttgccggccttaactttaccgaaaaaaaattgcaggaagcggtgagttttgttcaccagcatcgccgcaaattacacatcgccattaatacttttgcgcatccggacggctatgcccgctggcagcgcgccgtggatatggcggcgcagcttggcgccgacgcgttgattctcgccgacctcgctatgctggaatatgccgcagagcgttacccgcatattgagcgccatgtttccgttcaggcctcggcaaccaacgaagaggcgattcgcttttatcaccgcaactttgatgtccaccgtgtagtactgccgcgtgtactgtcgattcaccaggtaaaacaactagcccgcgtcacgccggtgccgctggaggtattcgcgtttggcagcctgtgcattatggcggaaggtcgctgctatctttcttcctacctgacgggggagtcgcccaataccgtcggcgcctgctcgcccgcccgctttgtccgttggcagcaaacgccgcaggggctggaatcgcgcctgaatgatgtcctgattgaccgttaccaggatggcgaaaacgcgggctacccaacgctgtgcaaaggccgctatttagtggacggcgagcgctatcacgcgctggaggagccaaccagcctgaacacgctggaactgctgccggagctcatggcggcgaacatcgcttcggtgaagatcgaaggccgccagcgcagcccggcctatgtcagccaggtggcgaaagtgtggcgccaggcgatcgatcgctgcaaagccgccccgcaaaacttcgttccacagcgcgactggatggagacgctcggcgcgatgtccgaaggcacccaaaccacgcttggcgcatatcaccgtaaatggcagtgagaggagctatgaaatattccttaggaccggtgctttattactggccgaaagagacgctggaagatttttatcagcaggccgcaaaaagcagcgctgatgtcatttatctgggcgaagcggtgtgcagcaagcgtcgcgcgaccaaagtcggcgactggctggaaatggcgaaatccctcgccgccagcggtaagcaggtggtgctctccaccctggcgctggtacaggcgtcatctgaattaagcgagctgaaacgctatgtggacaacggcgattttctgctggaagccagcgatcttggcgtggtgaatctgtgcgccgagcgcaaactgccgtttgtcgccggccatgcgctgaactgctacaacgcggtcacgctgcgccggttgctgaaagaaggcatggtacgctggtgtatgccggtggagctgtcccgcgactggctggtgaatttgcttaatcagtgcgatgaactgggcatccgcaatcagtttgaagtggaagtgttgagctacgggcatctgccgctggcctactccgctcgctgctttaccgcccgttcggaagaccgcccgaaagatgagtgcgaaacctgctgtatcaagtatccaaacggtcgtgacgtgctctcgcaagagaatcagcaggtgtttgtgcttaacggtattcagaccatgagcggctatgtctataaccttggcaacgaactgacgtcgatgcagggattggtcgatatcgtgcggctgtcgccgttggggacggagacatttgccatgcttgatgcctttcgcgctaacgaaaacggcggcgcgccattaccgcttgccgcgcatagcgactgtaacggctactggaagcggctggcaggtctggagctacaggcctagccggatggcggcataaataccttgtccggcctacaaatagcgatcccgtaggcccgataagcgcagcgccatcgggcattgtttttgccgtcagtctcataaagctcactttgttaacaacattcgctaatctttaatgcagtattaaaagattaaccggtaacaaagtgagccgttatgactgacaaaactattccgttctcggtgctggatctggcgccgatccctgaaggatcttcggcaaaagaagccttcacgcactcgctggatctcgcacggctggctgaaaagcgcggttatcaccgctactggctggcagaacatcacaacatgaccggtatcgccagcgcggcgacctcggtattgattggttatctggcagccaataccacaacattacatcttggctccggcggcgtgatgctgcctaaccattcaccgctggtgattgccgagcagttcggcacgctgaatacgctctacccgggacgtatcgacttagggttgggacgcgcgccgggtagcgatcagccgacgatgcgcgcgctgcgtcgccatatgagcggcgatatcgataactttccacgcgatgtcgcagagctggtggactggttcgacgctcgcgaccctaatccgcatgtgcgcccggtgcccggctacggcgagcagatcccggtctggctgttgggatccagcctgtatagtgcgcaactggcggcccagcttggcctgccgttcgcctttgcttcgcatttcgcgccggatatgttgttccaggcgctgcatctgtaccgtacccagttcaaaccttcagcgcggctggaaaaaccgtacgcgatggtgtgtatcaatattatcgccgccgacagcaaccgcgacgccgaattcctgtttacctccatgcagcaggctttcgtgaagctacgccgtggggaaaccggccaactgccgccgccgattgagaatatggagaccttccggtcgccatccgagcagtatggcgtgcagcaggcgctgagtatgtcgctggtcggtgataaagcgaaagtccgccacgggctggaatccatcctgcgggagacccaggcggatgaaattatggtaaacgggcagattttcgaccaccaggcacgcctgcattcgtttgatttagcgatggatgttaaggaagagttgttgggctgattttataacgccgattttcaacggtgatggttggcaatcggcgatttttttcgaagtaatcatagccgggcttcaacatacgccagaaattatattccggccatgcttgcgcctggcgcatattttcgtcattcatcgtaaatgggaagatatggacaggcacgctcttctgcccgctgtttagcgcctgcgccaccagttgataaatctcttcaataccggcatcggtcatggcatagcaaccggccgaaacgcagttcccgtgaaccataatgaaatcaccggtgtagccatttgcccgatcgtaagcattcgggtagccaatattaaatgccagatgatagcggctgtttgggttaagcaaccctttgttggtggcataaaagccttccgggcttttaccgtctccctgtttatgttttggccctaagccaccagaccatgcgcatatagtccaggttttgtagagtttgtaaggcttgttattggcgcttgcccacagttccagcttatcttccgctttcagaatgcggataaataactggtcgccggggtgaatgatttttaaagacgatgcgacaggtttttccactggcaggtaaacgtcttcatcgtacggagtgagccagaaaaattttaaaataaaagcgataaacaggctcaataatacaatagcgagtagtcctttacgccccattttcgtattccgcttattctgaaccagttcaagtatatattttcctatgatatgaaatagaggaaaggtccagttctgtacttttataaaatagtaatcgttttatcatggccgaacagggatatgaataaatcgacttattaccagagaaaatcatcatgagtgaacctgcttccttttttcttcatgcacatattaccgagagtaacctcaagaaatttttccattcaccggcaacaaatattaaagactatgacgactggttgccatggtttactgaggagcaaaggttgtacggcgatcctgcaaaaatgcttaacaatcttgccacatgtaattctggtgaaagtgaaaagaatatttatgctgaacatatcaactttaataaagaaacacagatagtcacgatggatcacatatttctctcagagagctatgaaatcttcatgccactcatggcctgtgtgcggggaatcgagaaatttattacgccaggggaaaataattttgcgctaatttattattactggtggggttcggagatcgccatcgcgctcgaatttgacgccaatggtagcagaataacggcaaatcctaaggcagaaaatttaactatcgccgatgcttttttcgatgaacacggggaagcactcgccgaagaactttataataaacagggttttatttgataccatttcgcggacttgtgaaatattgccggatgaaaacagctcatccggctcgttcaattactggtacaccggcaacaaattaaagctcgataaaatatgcaccagtgcgttcccgacgccaaatagcagaatcagtacaatcatcggtttaccgccccagacgcggaatttcgggctgccgaaacgttcgcgagatttacgtgccaacagcgcaggcacaatggccgcccagatagttgcagctaaacctgcatagccaatggcgtacagaaaaccgttcgggtacagcaggccaccaatcatcggcggcaggaaagtcagcagcgccgttttaaaacgtcccattgccgagtcatcaaaaccaaacagatccgccagatagtcaaacagccccagcgtcacgccaaggaaggaactggcgaccgcaaagttagagaacaccaccagcagcagatccaggctgcggctgttcagcacgccgctcaacgcctgtaccagcacatcaatattgccgcctttctgcgcaatgccgataaattccggacgcgggatgttgcccatcgtccccagcagccagacggaatagagcgctagtgccagtaacgtcccataaatcaggcatttgacgatggtacgcggatctttgccgtaatatttcatcaagctcggtacgttaccgtgataaccaaaagaggccagacaaaatggcagcgtcatcagcaggtacggcgtatatgacgcgtggctttcagccacgttaaacaacgtggcaggctgaacgtgccccaacaggctgccgaaggtcaggaagaaagtaatcactttcgcgcccagcacaatcgccgtcatccggctgaccgccttcgtactcagccacacgacaaacgccaccagcagcgcaaaggcaaaacctgccgctcgcgccggaacgttcagcgacatctcagcaaaggtatgatgcagaattgagccgctcgccgagatataggcgtaagtcaggatgtagagcacaaaggcaatagaaatgccgttgaccacgttccagcctttccccaacagatctttggtgatggtgtcgaaactcgaaccaatgcggtagttaaggttggcttcgagaatcatcagcccggagtgcagcatacaaaaccaggtaaagaccagcgccgccatcgaccagaagaaccacgccccggacatgaccaccggcagggagaacatccccgcgccaatgatggtgccgccgataatcaccacgccgccaagcagcgaaggtgacgtttgggtggtggtaagtgttgccattcagctctctctccagtcatttatagtgtgactatctctcaatacgctgcactgtaccagtacacgagtacaaaagaaataaaaaaagccccgattgtgacgatcggggctgtatattttactttacgctgtgaatgcgcaggtcagcgtgagttacgcatcaccgccgaaacgacggcgaccggtagagtcatcacgacgcggaccacggctttcacgacgttcgccgctgaagcgacgaccatcaccacgaccaccttcacgacgttcgccgctgaaattacgaccgccttcacgacgttcgccactgaagctacgaccaccgccgcgacgttcgccgcccgcgtgcggaaccgcatcacccaacagctgcatattcatcggcttgttcagaatgcgggtacgcgtgaagtgctggagcacttcgcccggcatacctttcggcagctcgatggtggagtgagacgcgaacagcttaatgttgccaatgtaacggctgctgatgtcgccttcgttagcgatagcgcccacgatatgacgaacttcaacgccgtcatcacggcccacttcaatgcggtataactgcatatcgccaacgtcacgacgttcacgacgcggacgttcttcacgatcgccacgcgggccacggtcattacgatcgcgcggaccacggtcgtcacggtcacggaattcacgcttaggacgcatcggcgcatccggcggcaggatcagcggacgctcgccctgcgccattttcagcagtgcggcggccagcgtttcgagatccagctcttcaccttcggcagacggctggattttcgccagcagcgcacggtactgatccagatcgctgctttccagttgctgctgaactttcgcggcgaatttttccagacggcgtttacccagcagttctgcgttcggcagttccacttccggaatggtcagcttcatggtgcgttcgatgttgcgcagcagacgacgctcgcggttctcaacgaacagcagcgcgcgaccggcgcgacccgcacggccggtacgaccgatacggtgaacgtaggactcggagtccatcggaatatcgtagttcaccaccaggctgatacgttcaacgtccagaccacgtgccgcaacgtcggtagcgatcaggatgtccagacgaccatctttcaggcgttccagagtctgctcacgcagcgcctggttcatatcgccattcaacgcggcgctgttgtagccgctacgttccagcgcttctgctacttccagggtcgcgtttttggtacgcacgaagataatcgccgcatcaaagtcttccgcttccaggaaacgcaccagcgcttcgtttttacgcatgccccagacagtccagtagctctggctgatgtcaggacgggtagtcacgctggactgaatgcgcacttcctgcggctctttcataaagcggcgggtaatgcgacgaatcgcttccggcatggtggcggagaacagagcggtctgatgaccttccgggatctgcgccataatagtttcaacgtcttcgatgaagcccatacgcagcatttcgtcggcttcatccagcaccagaccactcagtttagagaggtcgagggtgccgcgttttaagtgatcaagcagacgtcccggcgtaccgacaacgatctgcggcccctgacgcagggcgcgtaactgcacgtcataacgctgaccgccgtacaaggcaaccacgtttacgccgcgcatgtgtttagagaaatccgtcatggcttcggcaacctgtaccgccagttcgcgggttggcgccagcaccagaatctgaggtgccttcagctcaggatcaagattgttgagcagcggtaaagagaacgctgcggttttgccgctaccggtctgggccatgcccagcacgtcgcgaccgcccagcagatgcggaatgcactctgcctggattggagatggtttttcgtaacccagatcggtaagggcttcaaggataggagccttcagccccagatctgcaaaagtggtttcgaattcagccatgtagtacgtgtgcctcaaaattaatggcggccagtctacataactcatcatgaaattgatctgcaattttcattgaaaagtgtgaaccggctcaaagtaggtgtattaacgaacaacaacgccctcacccgcgaaggtgatggcaatcaaaaagattacgggctgatatgttcgtcagctattgctggtccgattctgccaggtcatcttggtcctggcccaggagcgataattccaacaatgcgtatcggtgctcaacaaagttatgaacgttgttggccaccgccagtttgaacagagccgtggcgctgtccaaatcccccagacttaggtaatacttacctaaatagaagttggtttcactgagatgctcagcgagcgaggtgttatccgttgcgtccgccttgagcctttccatcagcgttgcttcgctaatgtcgcccaggtagaactcgacaatgttccatccccattgctctttatccgatttttcgaagcgtgcttttaacgcttctttcgcctgcttctcattaagcttctgctcaacaagatacagccacaggctgcggtaaggatcattgggatcgtcttgataaaacgccagcagatcatcttgcgctaacttatcacggccgccgtaatacaatgcgataccgcggtttaagtgcgcgtagttgtaagttggatcaagctctagtacagaatcaaacgcttcataggcagcatcaaaattgcctgcctgcgttaaataaatgcctaagtaattgaatacttcaggcatatccggtctgattgccagcgcttgtgaaaaatcatttcgcgctaatgccctcaaaccaagactatcatacaacactccgcgctcatataaaagctgtgcgcgttcgtcatcggttaaagcccgactggcaagaatctgttccatacgcgccagaatcacttcctgctgtaaagtcggttgcaatggtactgcgaggacttcacttttacgccaggcggaattactgcatcctgcaagcgtaagtgctgtcgcaacgaaacaccagcgcaaaaaaggcttcatttcccactcccgaagacaacgattgaatgaacgtcctgttccccggtggctcaacaaggcgtccagccaggtctaaagccctccgcactgcggagggcaaaaggctaccttactcggcctgttcgctcgccggagcttccggcgcagccgcaggttgagactgctcggttgcttctttaatgctcagacgtacacggccctggcggtcaacttccagaaccttaaccgggacttcctgacccatctgcagatagtcggtcactttctctacacgtttatccgcgatttgagagatgtgaaccagaccttctttcccgccgccgatggcaacaaacgcgccaaagtcaacgatacgggtcactttaccattgtagatacggccgacttcgatctctgcggtgatctcttcgatacgacggatagcgtatttcgctttttcaccgtcggtcgccgcgatcttcacagtaccgtcatcttcgatttcgatggtggtgccggtctcttcagtcagcgcgcggatcacagaaccgcctttaccgatcacgtctttgatcttgtccgtgctgatcttgatggtatggatacgcggcgcaaattcagagatatcgccgcgcggcgcgttgatcgcctgttccatcacgcccaggatgtgcagacgcgcacctttagcctggttcaacgcaacctgcatgatctctttggtgataccttcaattttgatatccatctgcagcgcagagataccgtcgcgggaacccgccactttgaagtccatatcgcccaggtgatcttcgtcgcccagaatgtcagacagtacaacgtagttgtcgccttctttcaccagacccatagcgatacctgctacggcggctttaattggcacgccagcgtccatcagcgccagagaagcgccgcacacggaagccatagaagaagaaccgttggattcggtgatttcagacaccacgcgaacggtgtacgggaatttatccatgtccggcatcactgccagcacgccgcgcttcgccagacgaccgtgaccaatttcacgacgcttcggagaaccgaccatgccggtttcgcctacggagtacggagggaagttgtagtggaacaggaagctgtcagtacgctcgcccatcagttcatcaagcacctgcgcgtcacgggcagtacccagagttgcggtaaccagcgcctgcgtttcaccacgggtaaacagagcggaaccgtgagtacgcggcagtacgccagtgcgcacgtccagaccacggatcatgtctttttcacggccatcaatacgcggctcgcctgccagtacgcggctacgcaccacgtttttctcgatagcgtgcaggatttcgcccagctcgttagcatccagagtttcatcttctgcaataagctgctcgatggtttcggatttgattacgtcaacctgagcatagcgctcttgtttatcggtgatgcggtacgcgtcgctcagacgagattcagccagcgcagcaacacgcgcgttcaacgcgtcgttgacggcttccggctgccagtcccaacgcggtttaccggcttctttcaccagatcgttgatcgcctggataacaacctgctgctgctcgtgaccgaataccaccgcgcccagcatagtgtcttcgctcagcagttcagcttcggattccaccatcagcacagccgcttcggtaccggcaaccaccaggtccagcttgctttctttcagctcgtcctgggtcgggttcagcacgtactggtcattgatgtaacctacgcgcgccgcgccgattgggccgttgaacggaatgccggacagcgacagcgcagcggatgcgccgatcatcgccacgatatccgggttaacctgcgggttaacggaaacgacggtcgcgataacctgcacttcgttaacgaagccttccgggaacagcggacgaaccgggcggtcaatcagacgcgcgatcagggtttcgccttcgcttggacggccttcacgacggaagaagctgcccgggatacgaccagcagcgtaggtacgctcctgatagttaacggtcagtgggaagaagtcctggcctggcttggcttttttctggccgacaacggtaacgaatacggcggtgtcatccatgcttaccataacagcggcagtggcctgacgcgccatcatgccagtttccagcgtaacggtatgctgaccgtactggaatttacgaacgatcggattaagcaaaataatatcctttccaatttttgacggcataatacgcgccgtcgttaatacccgatcttctgcgcatcctcgcgactaatgacaaccctaaccctgatatgggtaaagcctctcattagccgcgcgaacctctgcaacggaagatcattcatagcaacaatacattagtttccagcgaattgctgccatctgctggaaaaaaggggccatgaaggccccctctttctgaaactcgaaagaattagcgacgcagacccagacgctcaatcagcgcggtgtagcgtgcaacatctttacgtttcaggtagtcgagcagtttacgacgctgagaaaccatacgcagcagaccacgacggctgtggtgatcttttttatgctctgcaaagtgaccctgcaggtggttaatctgtgcagtcaacagagcaacctgaacatcggtagaaccggtgtcgtttgcgtcacgaccgaactcagaaacgattttagctgtagcttcagtacttagagacattttaaaactccaaagtatttaagaatgagaggacgccgatctctaattcagcgatcccagtgtacgccgcgtaaactgttaaataatttacgcgacgttaagcggcggtattctactcgcagcgctctcttatcgcaagacgaagcgacattacgctgggtactctactaccagccgacgaggcgcgacacggccttcgtcgtcaatttcgcccataccgataaatttatcgtcttcaccttccgtcacacgaaccagtcccttcaacggcgcgcccgtggtacgaaccgggttgccatttttgaagtataccgaagatgttaacggcagattaacaacaggatagtccgaagctggactgtccattggcatcaataatggatcgagcaactgcgccgccggaacgccctgctgttccgcctgtgctaccagcgtctgcaaatgctccagcgtcaccatacgatccaccggatacttgctgaccgtcagacgacgcaggtacgttacgtgcgcgccacagcccagtttctcacctaaatcatcaataatggtacgaatataggtgcctttggagcaatgaacttccagctccagctcgttaccttcatggcgaataaacagcagctcatagacggtaatcgggcgggcttcgcgcggcacttcgataccctggcgggcatattcgtacagtttcttaccctgatacttcagcgccgaatacattgacggaatctgctcaatatcgccgcggaaagtctccagcgcgctcgcaagctgctcagcgctgaaagtcaccggacgctcctgcacgatttgaccatcggcgtcagaggtatccgtgcgctgccccagacgggcaataacacgatagcgtttgtcagaatccagcaggtactgcgaaaattttgtcgcttcgccgaggcaaatcggcaacatgccggtcgccagcgggtccagcgcgccggtatgcccggcgcggttggcattgtagatgcgcttaactttctgcagcacgtcattgctggacataccctgcggcttatccagcagcagaacgccgtgaatgtcgcggccacgacgacgaggacgactcatcagtcctccttgctgtcgtccgggttcacacgacgttcttcgtcatgtttcaccacgttagttaccaggttggacatacgcatcccttccaccagcgagttgtcgtagaagaaggtcagttccggcacgatgcgcagacgcatcgctttacccagcaagctgcggatgaaaccagacgcttcctgcaacgctttgatgcccgcttttactgcgtcttcatctttgtcgttcaaaaaggtgacaaacactttggcataggccaggtcacgggacatttcgacaccggagacggtagtcatcatgcccaggcgcgggtctttaatttcgcgctgcaggatgattgcgatctctttttgcatctcttgcgctacgcgctgagggcgaccaaattctttcgccataataaattctccagaataaagacaaaaaaggggccataagcccctttttaaatttcttgccgggtggcgcttcgcttacccggcctacgcctaatcatcttctaaggattttggattgcaacaaggcggcaagctcgtaaatccccgggagcatagataactatgtgaccggggtgagcgagcgcagccaacgccgttgcggcccaaaagacgacgaagattaagcgatggtacgttggatctcgataatttcgaatacttcaatcatatcgccaacgcgaacgtcgttgtagttcttcacgccgataccacattccatgccgttacggacttcgttaacgtcatctttgaagcggcgcagggattccagctcgccttcatagataaccacgttgtcgcgcagtacgcggattgggttatggcgtttaatcgtaccttcggtaaccatacagcccgcgatcgcgccgaatttcggcgatttgaacacatcgcgcacttcagccagaccgataatctgctgtttcagttccggagacagcataccgctcatcgccgctttcacttcgtcgatcaggttatagatgacggagtagtaacgcagatccaggctttcagattcgatcactttacgcgcagaggcatcggcacgaacgttgaagccaaccagaatggcgttggacgccgcagccagggtcgcgtcggtttcggtgataccacctacgccagaaccgatgatcttcactttcacttcgtcggtagacagtttcagcaaagagtcggagatcgcttccacagaaccctgtacgtcggccttcagcacgatgttcacttcgtgaacttcgccttcggtcatgttggcgaacatgttctcaagtttagatttctgctgacgcgccagtttaacttcacggaatttaccctgacgatacagagcaacttcacgcgctttcttctcgtcgcgaacgacggtcacttcgtcacccgcagccggaacgccggacaggccgaggatttccaccggaatggacggccccgcttccagcacttcctgacccagttcgttacgcatcgcacgcacgcggccgtattcgaagccacacagcacgatatcgcccttatgcagcgtaccttcgcgtaccagaacggtagccaccggaccacgacctttatccaggaaggattcgatcaccgcaccgctcgccatacctttacgaacggctttcagttccagaacttcggcctgcagcaggatagcgtccagcagttcgtcgataccggtgcccgctttcgcagacacgtgaacgaactggctctcgccgccccactcttccggcagaatgccgtactgggacagttcgttcttaacgcgatccggatcggcttccggcttatcgattttgttcaccgcaaccacgaccggcacacctgccgctttcgcgtgctggatagcttcgatagtctgcggcatcacgccatcgtctgccgctaccaccagaaccacgatatccgttgcctgggcgccgcgagcacgcatcgaggtaaacgcggcgtgacccggggtgtccaggaaggtgatcatcccgttgtcagtttcaacgtggtaagcaccgatgtgctgggtaatgccgcccgcttcgccagaggccactttcgtggaacgaatgtagtccagcagagaggttttaccgtggtcaacgtgacccatgatggtcacaaccggggcgcgcggttcagccgcagcgccggtatcacggtcgctcattaccgcttcttccagttcgttttcacgacgcaggataactttgtggcccatctcttcggcaaccagttgtgcggtttcctggtcgataacctggttgatggtggccatagcacccagcttcatcatcgctttgatgacctgagagcctttaaccgccatcttgttcgccagttcgccaacggtgatggtttcaccgatcaccacgtcgcggttaacggcctgagcgggcttctggaagccttgctgtaaagaagaccctttacgcttgccgcctttaccgccgcgaaccgcagcacgcgcttcttcgcgatcggctttggattcggcatgtttgccttttttcgccggacgcgctgcttttgcattacggccacgaccacgaccgccttctacttcacgatcgttttcgtcttcggcctggcgagcgtgctgagaagtggtgacatgatagtcactggtgtcttctactggctcaggcgttgcggtccatttgttttcttccgccatgcggcgagcttcttctgctacacgacgcgcttcttcttcgagtttgcgacgtgcttcttcttccgctttacgcttcagctctgcagcttcattctcacggcgggctttttcggcctgggcggttttggtcatatcgtcagtctgttgattgctcactttgtctttttccgcagcttcacgtttcgctttttcagcggcttcacgcttagcttgttctgcggcctcgcgttcagctttttgttgcgcctcgcgtttggcctgttcttctgcctcacgacgggcttgctcttccgcttcacgctgcgcctgctcttccgcggccaggcgttcagcctcttgcggatcgcgtttcacaaaggtgcgcttcttgcggacttcgatttgtaccgatttactttttccaccggtaccaggaatattcagggtgctgcgcgttttacgctgcagcgtcagtttatcgggaccagaaaccgcttcgcggttcaggtgcgccagtaaagtctgtttttcttgtgcggacacagagtcgtcagcagatttccggatacctgcatcagcaaactgctgtaccaggcgatccacggaaacctgtctctctgcggccagcgcttttagggttacatctgtcatgctgttccttcctgctacagtttattacgcttcgtcgccgaaccagcaaatattacgggcagccataatcagctcaccggctttttcgtcggtcaacccttcgatatcagccagatcatcaatgccctggtcggcgagatcttccagcgtacaaacaccacgagccgccagtttgaaagccatatcgcgatctaatccttccagattcagcagatcgtcagccggtttgttatcaccgaggcttgcttcctggtcctgcgccagagtggccagtgcgtttttagcacgctcgcgcagtgcttcaacggtcggctcatcaaggccgtcaatttccagcagttctttcattggcacataggccagttcctcgagcgtggagaaaccttcttctaccagaacggtcgcgaactcttcatcaatatcaagatatttagtaaaaatctcgatagcggcatgtgcttcagcctgatgtttagcctgcaagtcatcaacggtcattacgttgagttcccagccgctcaattgcgaagccaagcggacgttctgaccattacgtccgatcgcctgcgccagattaccggcttcaacggcgatatccatggtatgtttatcttcgtccaccacgatagacgcgacgtctgccggcgccatcgcattaatgacgaactgcgccgggttatcatcccacagcacgatatcaatacgctcaccgcccagttcggtagagaccgcctgaacgcgcgcgccgcgcatccccacgcaagcgccgaccggatcgatacgtttatcgttggttttcactgcgattttcgcacgagaacccggatcgcgagccgccgctttaatttcaatcacttcttcgccgatttccggcacttcgatgcggaacagttcgatcagcatttccggcttggaacgggtgacgaacagctgcgcgccacgcgcttccggtcgaacagcatacagcacgccgcgaatacggtcgccagggcggaagttttcgcgcggcagcatatcttcacgcagaatcaccgcttcagcgttaccggccatcccttcggatttaatttccagagagatattgtcgcggttcactttcttcaccacgccagtgacaatttcgccttcctggtcgcggaactgatcgacaaccatcgcccgttcagcttcacggaccttctgcacgataacctgtttcgcagtctgcgtggtgatacggtcaaaggtgacagattcaatctgatcttcaacatagtcgccgacattcaggctttcgtcttcaaaacgcgccgcttccagcgtaatttccttcgtcggcatggtcacttcttcaacgatcaaccaacggcggaaagtatcaaaatcaccgcttttacgatcgatttctacacgaacatcgatctcctgctcatattttttctttgttgctgtcgccagcgcactttccagcgcttcaaaaattttttcgcgtggcagcgctttttcgttggagacggcttcaacaacagccaaaatttctttgttcatcgcgggcttttcacctcatccagactgttaaaagtggggaaccaggttcgccttctggatattactcagcgcgaacacttcatctttgccttcgactgtgacggtaatcatttcaccgtccaccgctttgataatgccctgccacttgcgacggttctgtaccgccatgcgaagaaccagcgcgacttcttcaccctggaaacgcgcataatgatcggcagtgaacataggacggtcgagacccggtgacgagacttcaaggttgtaagccacggagataggatcttcaacgtccagcaccgcgcttacctggtggctcacatcagcacaatcatcaacattgatgccatcttcactatcaatatagatgcgcagtgtggatgtgcgaccgcgaataaattcgatgccgaccagctcgtagcctaaggcttcaactggcgctgtaatcatctctgttaatttttgctctaatgtggacaagcccacccccaagacataaaaaaagggcctaaagcccagttattctgtagtcagataacaaaaaaccccgataaatcggggctttagataactgaaccctataaccgcaacggcggtctggtgtaccttccgaaagaatttttttcaaatccagctacgaaggacataatcttcacagtatatttgaaaaagaactctaagggaaagtggttgcgggggccggatttgaaccgacgaccttcgggttatgagcccgacgagctaccaggctgctccaccccgcgcctgaaacgtggcaaattctactcgttttgggcaaaatttgcaaatactgctgggatttggtaccgaggacgggacgtaaaatctgcgcacagtatagtgacctggcatgagttatgtcaaccctattcccaatatgcagatgaatgaatatcactcttcgttatactcatcccacctctccggcttatacacgcatgtcacaacgttatttcagtaaaccttcactaaacgcttcctgtctctgctaaaagatgattaaatgaaaactcatttattttgcataaaaatgcactaaagcagaaaccgatctcattatcagtcaatcaagcagggttctattctatgacgacgattcttaagcatcttccagcaggtcaacgtattggtatcgctttttccggcggtctggacaccagcgccgcgctgctgtggatgcgacaaaaaggagctgtcccatatgcctatactgcgaatctgggacaaccggatgaggatgactatgacgccattcctcgtcgcgcaatggagtatggcgcagagaatgctcgcctgattgattgccgcaagcagttggttgcagaagggatcgcagcgattcagtgcggcgctttccataatacgactggcggactgacctatttcaataccacgccgctgggccgtgccgtaaccggcacgatgctggtcgccgcgatgaaagaagacggcgtgaatatctggggcgacggcagtacctataaaggcaacgatattgaacgtttctatcgttacggcctgctgacgaatgctgaattacagatttacaaaccgtggctggataccgactttatcgatgagctgggtggtcgccatgagatgtctgaatttatgattgcctgcggtttcgactataagatgtcagtcgaaaaagcctactccaccgactccaacatgctcggcgccacgcatgaagcgaaagatctggagtttcttaactccagcgtcaagatcgtcaacccgattatgggcgtgaagttctgggacgagagcgtgaagatcccggcagaagttgtgaccgtccgcttcgagcagggtcaccctgttgccctgaacggtaaaaccttcagcgatgatgttgagatgatgctggaagcgaaccgcatcggcggccgtcacggcctgggtatgagcgaccaaattgaaaaccgcatcattgaagcaaaaagccgcggtatttatgaagcccctgggatggcgctgctgcacatcgcttacgagcgtctgttgaccggtattcacaacgaagacaccattgaacagtatcattctcatggtcgtcagctgggtaaactgctgtatcagggccgctggttcgactcgcaggcgttgatgctgcgtgacggcctgcaacgttgggtcgccagccagattaccggtgaagtgacgctggaactgcgtcgcggcaacgactactccatcctgaacaccgtgtcagacaacctgacctataaggctgagcgtctgaccatggagaaaggcgagtccgtattctcaccggacgatcgtattggccagttgaccatgcgtaatctggacattaccgatacccgcgagaaactgttcggctacgcgaaagcgggtctgttaaccgcctcttccgcgaccggtctgccgcaggttgagaatctggaaaacaaaggcaaataagcccgcgtcgttgatgcaacaggccgcgaaagcggccttttttgtgaatatcaccccaggttgatgcaaatggcggatttgccggttaatctaactggacaacatttcgcaccctgtcaaagcattgtgcagccatgtctttttcagtcatcattatatagtcaatgcccccgccaaaatccggcccagcgacagccagtaatgctgttgtagaatgaatttcttcatcccagctaaaaagctgtcgccaccttgtatcattttgattcagttcatcttccacactacgttggagaggaattgtccaccctcccagaagatcgccggaatagcaggcatcaactcgatacgggttgtcctgttcgtaatcacttaacgcgtcataccatgattcatacgctttctgctgcgtaacgcttaacccctcgcagactgacgaaacactgataacggaaagaggttccaggcactcaacctgtgtacacaattgccatggttcacgaaattcaatcttattgtaaaaagccagcaagtcatctggcacagctagcgtgcttaatgtatctacctcaacatcgtgccagaaaacaaagggctgccgatcttcccaggtaacatcgacaaagaagctcaataacccccgcctgggaagcagtggatcaaaccccgggagtaacgccaggtcactcaagtttagttgggcaacgaaagcaagcggaaaatcaaccaactgattctctatgcggatgtcaatttcggttaataaccgctgctgcactaaccgatacttttcctcgtcaaaatcttccgctggctgcccaagcagcttacgcccttcattgagcagctcataactcattttcatttcatgaacaaacctggcatttcgcgttttttcagctttcagctttagtacgcgagatgtggcattaaccgatttttttcgtataggccagctttgtcctaatggccagtcgggtagaccgcccaaccgcgatgcccccacctttactgtttccatatcccgcagacaacgtttaaatgcaatagcagcacgtgcctgttgcacgactttctcctgaatagcagagctcaaattggatgtgcgcaattcagcaatcaatccagcacgatcgaaaaataaactcattaatctcttccttagatattcggctcagtgcaaaggaagattagataaaactacttgagcaaaagatatggagggggataacagatacaagcatttcagattatagctgagcaactactggcttcaatgaacgaagatgatctcgtaatcggtggagtgaacctgacgcagggagatcaccagagaggacatacatgagtatgtatgtagggctatctcaacgtattgacggggccatgccagggacgcgtgtaagcgtgcttcaacctcctctctgagagcagtttcaacagacgaaaaaaaagacgcttttcagcgtctttctttcggaatattggtaccgaggacgggacttgaacccgtaagccctattgggcactaccacctcaaggtagcgtgtctaccaattccaccacctcggcacggatactgctattagcgcgggatatcgctggtcggctgggccggtgcagcaggttgagtctgctcggtcttcgccggcgcactcagattttcccactcgcttcctttattggttttgttgctattgatattacccaacaccagactgatgatgaagaacagcgtcgccaataccgccgtcattcgggtcatgaagttaccagaaccacttgaaccaaatagcgtagcggaagcgcctgctccgaaggaggctcccatatcagcgcctttaccttgctgcagcatgatcagacctacaaggccaattgccacaataaggaaaacaactaaaagagcttcgtacataatcaacctgttccttgcggagttgccgcgtaccaatgcttctaccaataaagcgggatttttactgtttcccactgaagcgggtgtgaatactaaccaaagcgaatgaccttcgcaagggcaatttaagcgcattgtatcaactgcggaaaaaaacagcaaaagcgttgttttttgcgggccgtaaggcggcaaccgccgcctttttagtcacttaaacgcttaaacggcttttaccgcatccgcgatacgatgggcgaatgccgtaacctgcgcttcatcctcgccttccaccatcacgcgaatcagcggttcggtaccggatttacgtagcagtacccgcccacgattgccgagcgtggcttctacgtccgccgttaccgctttcaccgcttcattttccagcggatcgccgctaccggcggtgtaacgcacgttaaccagaatctgcgggaacattttcataccgctgcacagatcgtgcagactcatatgattacgcaccatcgccgccagaacttgtagccccgctacaataccgtcgccagtggtcgttttatccaacagaataacgtgaccagagttttccgcgccgatgcgccagcctttttcctgcaatttttccagcacgtagcggtcgcccactttcgcccgggcaaacggaatgccaagctgcttgagcgccagctccagccccatattgctcatcagcgttcccaccgcgccgccgcgcagctgcccctggcgcagcccttcgcgcgcgatgatatacatgatctgatcgccatcgactttattgccttcatggtcaaccatgatgacccggtcgccgtcgccgtcaagcgcgatgccgaggtccgccttctccgccaacacgcgcgcctgcaacgcgcgcacgtcggtcgcgcccacttcttcgttaatgttgacgccgtttggctcacagccgatggcgataacggtcgcgcccagctcgcgcagcacattcggcgcgatatggtaggtagcgccgttggcgcaatccacaaccactttcaggccattgaggctcagttcgttcgggaaggtgcctttacagaactcaatatagcgtccggcggcatcgacgatgcggctcgctttacccagctcagcggagtctacgcaggtgatctctttttccatttcggcttcgatggcttcttccacatcgtcaggcagtttcgtaccgtcgatagagaagaatttaatgccgttatcatagaacgggttatgcgaagccgagataacgatacccgcctccgcgcggaaagtccgcgtcagataggcgacggctggcgttggcataggtccggtaaacgaggccgacagtcccgcagcggcaaggcccgcctccagcgcggactccagcatatagccggaaatacgcgtatctttaccgataatgattttacgcgagccatgacgcgccagcacttttccggcagcccaacccagtttaagcacgaaatcaggtgtaatgggggcattgcctacacgtccgcgaatcccatcggtaccgaaatatttacgattactcatagcgtttgtttccctttgcagacagagtggcttccaccacccgcatcgcctctacggtttctttgacgtcatggacgcgaatgatctgcgcgccctgcatcgcggcaattaccgcgcacgcaaggctgccgttcagacggtctgatggtcccacgttaagtaactgaccaaccatcgttttacgtgacatgcccaccagcagcggcaggttaaaatgatgaaactcacccagtcgcgccagtaaggtataattgtgagagagatttttaccgaaaccgaatcctgggtcgagcaacaatttctcttttgcgatgccggccttctcacaacgtgctatttgctcaataaagtagcgattcacctcggcaaagacatcgtcatatttcggcgcctcctgcatggttttggggttgccctgcatgtgcataagactgaccggcaagccggtttccgctgccgcttccaacgcgccgggttcggagagtgaacggacatcattgataatatgcgcgcccgcccttgccgcttcacggatcacctcgggtttagaggtatccacagaaatccacacttcaaaacgttgcgcgattgcttccagtaccggaataacgcgatccagctcttcttccacgctcacttctgccgcgcctggtcgcgttgattccccccccacatcaataattgtcgccccggcattcaccattaaattcgcatgtttcaccgcctcaatcagcgtgttatgcgcgccgccgtcggagaacgaatccggcgttacgttcaggatccccataacatgcggatgagtgagatcgagcgtggcgccctgagcgaagagtttcatggtcaaaatccctgttttatttatggtgagttaaaaaaataaatatcctccggcatagccggaggtttttcagatgcgcctataaggctctcttaccagccgcgccctaacaggcgcatacgatctgacatttgcatcaaacttcgttacttacggcccgtaaacgggctgcccggatacgggatcgataattgctcacccattttatcctcttcaagctggtgctttatgtagtcctgtatcttcgccgtgttcttacccaccgtatcgacatagtaccctctgcaccagaactccctgttcctgtatttgaattttagatccccaaactgctcgtaaagcatcagactacttttacccttcagatatcccatgaaactcgacacactcatcttcggcgggatctccagaagcatgtgaatatgatctgcacaacattctgcttccagaattcgtacgtttttccattcacacaattttcttaatatgctgcctactgccctacgcttctctccatagaacgcttgtcttcggtatttgggcgcgaaaactatgtgatatttacagttccatcgggtgtgcgctaagctcttttcgtcccccattgggacccccttttgatttcttgttgaacttttgcagttgccagaccgcaagatgttttaacaaatcaaaaggggttttaataactggcttaaagctgaaagctttccggaacccccagcctagctgggggttttccatagacaagaaaaaccccggggcaagccccagggtttcggtgagcgctaaacataatgttgtaaaacaaatgcttatttgtcgcccagctgctctgacatcgtgttgcccgggttcggcgtgcgtggttcatcaaccggacgcggcgcctgaggcgtaccattgctgtcagagttattggtgccgtttggatcttcccagcccgcaggcggacgcacttcacgacgcgccatcaggtcatcaatctgcggcgcatcgatggtttcatatttcatcaacgcatctttcatcgcgtgcagaatatccatattgtcagtcaggatctgacgagcgcgattgtagttacgttcaatcagcgctttcacttcctggtcgatgatacgcgcagtttcatcagacatatgtttcgcttttgcgacgctacggccgaggaatacttcgccctcttcttccgcatacagcaacggaccgagtttctccgagaagccccactgggtgaccatgttacgcgccaggttagtcgcgactttaatgtcgttcgacgcgccggtggaaacatgctcaacgccgtagataatctcttccgccagacgaccgccgtacagcgtgctgatttggctttccagcttctgacggctggcgctgatcgcgtcgccttcaggcaggaagaaggtcacgcccagcgcacgaccgcgcgggataatcgtcactttgtgcaccggatcgtgttccggcaccaggcgaccgataatcgcgtggcccgcttcgtggtacgcggtcgactctttctgcgcttccgtcatcaccatggagcgacgttcggcgcccatcatgattttgtctttcgctttctcgaactcaaccatcgacacaacgcgcttgttaccacgagctgcaaacagcgccgcttcgttgaccaggttcgccaggtccgcaccggagaagcccggcgtaccgcgcgcaatgatcgccgcatcaatatccgtcgctaacggtacgcgacgcatatgcaccttcagaatctgctcacgaccgcgcacatccggcaggcctaccaccacctgacggtcaaaacggcctggacgcagcagcgccgggtccagaacgtccggacggttagttgcggcgataacgatgataccttcgttaccttcgaagccgtccatctcaaccagcatctggttcaacgtctgctcacgttcatcgtgaccgccgcccagaccagcgccacgctggcgacctacggcgtcgatttcatcgatgaagataatgcacggcgccgctttcttggcctgttcgaacatgtcacgcacacgagacgcgccgacaccgacgaacatttccacaaagtcagaaccggaaatcgtaaagaatggcaccttcgcttcacccgcaatggcttttgccagcagggttttaccggtacccggcgggccgaccatcaggacacctttcggaattttaccgcccagcttctggaaacggctcggttcacgcaggtattcaaccagttccgccacttcttctttcgcttcgtcacaacccgcgacgtcagcaaacgtggttttgatctgatcttccgtcagcatacgcgccttgctcttaccgaacgacatggcgcctttgccaccgccgccctgcatctgacgcatgaagaagatccagacgccgatcagcaacagcatcgggaaccaggaaatgaagatagaagccagcaggcttggctcttcaggtggttcgccaacaaccttgacgtttttagtcagcaggttatcaagcagcttcggatcattaatcggaatgtaagtcgtgtaacggttactatctttcttggtaacgttgatctcacgtccgttgatacgcgcttcgcgaacctggtcctgattgacctcttgcaggaaggtagagtaatccaccttacggccattagactcgctgggcccaaagctctggaatactgacatcagcacaacggcaatgaccagccagagtattaggtttttcgccatgtcactcaagggattaacctcttattacaactgtgttaaaaacagcgtcaggatactctatatccagtttctttcaaaccttacgtctgaaatctgccggttatcactttcgcccggtcgctacaatgtacacttcacgcgaacgcgcacgcgaagagtccggcttacgaactttaaccttcgtaaacagggagcgaatttcccttagatactcatcgaaaccttcgccctggaacaccttcactacaaaacttccgcctggcgccagcacatcgcggcacatctctaacgccagctccaccagatacatggcgcgggggatatccaccgccggtgttccgctcatgtttggtgccatatccgacatgacaacttgtactttactgtcacccacgcgttccagtaacgctttcatgacaagttcatcacgaaaatcgccctgaagaaagtccacaccaacgataggatccataggtaaaagatcacaagcgatgatgcggcctttgccgccaatctgcgtgaccacatactgtgaccagcctcctggcgcagcgccgagatcgactaccgtcattcccggcttaaaaagtttgtcactttgctgtatttcatcaagtttaaaccaggcacgggagcgtagcccctttttctgcgcctgttgaacatatttatcgctaaagtgttcctgaagccagcggcttgagctggcagaacgctttttacctgtcatttaactttcccgtcggggcagttcatcgtagccaatggcgtaaatttctacacgcctatttggcgatataagggagatggcggtagaatgacccgttttcaatcccaacgtaagcaaaaatatacgatgaatctgagtactaaacaaaaacagcacctaaaaggtctggcacatccgctcaagcctgttgttatgcttggcaataatggtttgaccgaaggggtactggccgagattgaacaagcgttagagcaccatgaacttatcaaggtgaaaatcgcctcggaagatcgcgaaacaaaaaccttgatcgtggacgctatcgtgcgcgaaaccggcgcctgtaacgtacaggtcatcggtaaaacgctggtgctgtatcgcccaactaaagagcgtaaaatctcgctgccgcgttaaggatatcctaaagtcgaacacaaaatctgtgtaaaacgaggggttttccacgagcaggagagcaaaatgccacgctctctccgttgataaaaggccgctatgcggcctttttcctttctttacaatacaccaacaatttgcgtattgagtactgcttaaaggtattccactttaagcacttcgtattccacatcgccgccaggcgttttgatcaccacgacgtcatcctgctctttgccgatcaggccgcgagcgattggcgagtttaccgaaatgagattttgcttaaaatccgcctcatcgtcgccaacaatgcggtaggtctgctcttcgtcggtgtccaggttcagcaccgtgacggtagcgccgaaaatcacgcgaccattgttcggcattttagtgacatcaatcacctgcgcattcgacagttttgcttcgatatctttaatgcgcccttcgcagaaaccctgctgttcgcgtgcagcatgatactccgcgttttcttttaaatcgccatgttcgcgcgcttcggcgatagcggcgatgatttcaggacggcgcacagatttcagaaaatccagctcttcgcgcagtttttcggctccgcgtaaggtcatcggaatagcttgcatttgttatacctcttgaacattcctgtagggggcaatgaactctaccccggctgctaagccagccccggcatatgccataccagggtcagaagcaaaaaaacaccaacccgggcgcgcagtcccaggtcagctacaatttcctctttgataaccattttaccctggagttccctatgggtcatcgtttactttttagggcgttgcgccgtagtatgacggcttgtttccagggtgttagcgcgagattatgcgattttccagatttatcatcggattgaccaccagtatagcgttcagcgttcaggccgcgaatattgacgaatacatcaaacagcttccggccggcgccaacctcgcgctgatggtgcaaaagattggcgcgcccgcgccggctattgattatcatagtcagcagatggcgcttcccgccagtacccaaaaggtgattaccgcgctggcggcgctgattcaactcggcccggatttccgttttacgaccacgctggagactaaaggcaacgtcgataacggcatcctgaaaggtgacgtaattgcgcgcttcggtggcgatccaacgctaaaacgtcaggatattcgcaatatggtcgcgacgctgaaaaagtccggcgtcacgcaaatcgacggcaatgtgcttatcgacacgtcgattttcgccagccacgataaagcgccaggctggccgtggaacgacctgacgcagtgtttcagcgcgcctcccgccgccgccattgttgaccgcaactgtttttctgtgtcgctttatagcgcgcaaaaaccaaacgatttagcctttattcgcgtggcctcttattatccggtaacgatgttcagccaggtacggactctaccgcgcggttcggcagacgcgcagtattgcgagctggatgttgtgcctggcgatttgaaccgttatacgcttaccggctgtttaccacagcgcgccgacccgctgccgctggcctttgctattcaggacggcgccagctacgcgggcgcgatcctcaagcaggaactgaaagaggccgggataacttaccgcggcacgctgctgcgccagacgcaggttaacgagcccggaacgatcgtcgccagtaaacagtcggcgccactgcacgatctgcttaagattatgctgaaaaagtcagacaacatgatcgccgatactgtttttcggatgattggtcatgtcaggtttaacgtgcctggcacctggcgggcgggatcggatgccgttcgccagatcctgcgccaacaggcgggaattgatatcggcaataccattattgccgacggttccggtctttctcgccataatctgatcgctcccgccacgatgatgcaggtgctgcaatatatcgcccaacacgataacgagctgaactttatctctatgctgccgctggcgggctatgatggttcattacaataccgcgccgggctgcatcaggcgggcgtagacggtaaggtttcagcgaaaaccggatcactgcagggcgtgtataatctggcgggctttattaccaccgcaagcgggcaacggatggcatttgtacaatatttgtccggctacgcggttccacctgccgatcagcgtaatcgccgaatcccgctggtacgcttcgagagtcggttgtataaggatatttatcagaataactgagtgcatttattgccggatggcggcgctaacgcgtcttatctggcctacaaagaacataataaaacgggccgcaaatgcggcccgttggcttttgtaggccggataagcgtaagcgccatccggctacgagattaacgtttgtagatgaactcgacgccttcttcgtcgtcttcatcccagtcgtcatcccagtcatcgtctgcgtcttcttccacttcagccagctgctggcgatgataatcgtcccacatgaactcgactttttccggctgttttgcttcttcagcctgcgcgatcggattctcgatgataaaggtcatcacatcccagcagagatctttcacccccagctgactggcagcggaaatcagatagtatttcccttcccagcccaacgcttcggcgatcgctttcgctttctcttccgcttcggttttatccatcagatcgatcttgttgaacactaaccagcgcggtttagccgccagatcctggctgtatttttccagttcgccaataatgatacgggcgttttccaccggatcggaaccgtcgatcggatcgatatcaatgaggtgcagcagtacgcggcaacgttcgaggtgcttcaggaagcgaatccccaggcctgcgccttccgccgcgccttcgatcaaccccggaatgtcggccaccacaaaactcttttcgctgtccatacgtaccacgcccaggctcggcaccagcgtggtaaacggatagtccgcgactttcggttttgctgccgataccgcacgaatgaacgttgatttaccagcgtttggcatccccagcatcccgacatccgccagcagcatcagttccagcagcaggtcgcgcttatcgcccggcgtaccattggttttctggcgcggcgtacggttaaccgaggatttaaaacgggtattgcctaacccatgccagccgcccttcgcgaccaacagacgctgaccgtgtttggtcatgtcgcccatcgtttcaccggttccctggtcgataacgcgcgtaccgaccggcactttgatggtcacgtctttaccgcgtttaccggtacagtcgcggctcgcgccattctgaccacgttcagcgcggaacgatttttcaaagcggtaatcgatcagcgtattcaggttttcatcggcttccatccagacgtcgccgccgtcgccgccatcaccgccgtccgggccgcctttcgggatatatttttcgcggcggaagctcacacagccattaccgccatcgcctgcaacgaccagaatcgatgcttcatcaacaaacttcattttattctccgtaaatcattcgcctgagcggggttgcgaaaccaccgtttcatgcttgcgtaaaccgccccaaatacgatgaccaatggcggaatacatcgcgcccgcaaccacgacaaacgcaccgagataacctaaaaggtttaacatcggtctggcgaagaaatcgggccaggccatagataaaagatctgaaaacagcagggtaaatagcggtgtaagcgtgattatcgcgctcacctgcgccgcctgccaacgcgccatcgcttccgccagggcgccatatcctaccagcgtatttagcccgcagaaaatcaaacaggcgagctgccagtcgctcagttgcgctatcaccatcggttttgccagcggcaagagcgctatcgtacataaagtgtacagtaaaaacaggatctgctgcgaggccagacgtcgcaataatactttttgcgccacgccatagctcacccacaccatcgccgcgcctacgccaaaaataacgccccaggtgtagtcggtcagtcgggtaaaaatctcgatcagactggtgttaaaaaacatcaccagcccgctcaataacatcagcgcgccaatcacctgcgtaccgcgcatcttttctttcagaataaagacgctggcgaccatcatgccaaccggcgagagctggccgataacctgcgacgcggttgggcttaaatattgcagggaagaactgaacaaaatgaaattaccgaacagtccgcaggtcgctatcgccaataacaccaaccagcgcggcttacgaaaaatacgcagcggcggcagctttctttttactgccagtatcgccccgaggccaatactggccattaagaagcggtagaagacaatggttgaaggctccatcacctccagcacttgcttcattgctattggcaacgctccccagcacatcgcggtagtgagcgctaaaagaatgccaatgcctgcctgctgcttcatgccgtgttccctgcaaagacccgttaacggcattcgcacagccacacgggtatattttagtcggccatcgaatgtaaaaagccccgcaacaggtgcggggctttcatccgttaccggaccacaaaaaacttactcagcaacgatgctgatgtatttacggtttttcgggcctttaacttcgaatttcactttaccgtctgctttagcaaacagagtgtggtcacgaccgcaaccaacgttggtgccagcgtggaatttagtaccacgttgacgaacgatgatgctgcctgccagaactgcttcaccgccaaagcgttttacgcccagacgtttagcttcagaatcgcgaccgttacgagtcgagccgccagcctttttatgtgccatttaatctgctcccctaatcttaagcgctgatgccggtaattttcacatcagtgaaccactgacgatggccctgctgcttacggtagtgtttacggcgacgaaacttaacgattttaactttctcgccacgaccgtgggcaacaacttcagctttgattacgccgccatcaacgaaaggaacgccgattttgacttcttcaccgtttgcgatcatcagaacttcagcgaactcgatagtttcgccagttgcgatgtccagcttttccaggcgaacggtctgaccttcgcttactcggtgttgtttaccaccactttggaaaaccgcgtacataaaaaactccgcttccgcgcacacctttcaatgattcagagcgcgctataaatattcacaatagggcgcgaatattacgcaaattgcacggctttgacaagtgctaccatcaatacatgaagaaaaaaaacacaacgcatacggtaacgtttatctgcggcgttttttcagtacaatcagggtatatttctaaccataaaccctacgttacctcattcagacatgggataatcggggcgataagcccggcttttgcgatgaatttagaaaaaatcaacgagttaaccgcgcaagatatggcgggtgtcaatgcgacaatccttgaacagcttaattccgacgttcaactgattaatcagctaggatattacattattagcggcggcggaaaacgcattcgtccgatgattgccgttcttgccgcgcgcgcggtgggttatcagggtaacgcgcacgtgactatcgccgctctgatcgagtttatccacacggcgacgctgctacatgatgatgtggtggatgaatccgatatgcgtcgcggcaaagcgacggcaaatgccgctttcggtaatgccgccagcgtgttggtcggcgactttatctatacccgcgccttccagatgatgaccagcctcggctcgttaaaagtgctggaagtgatgtcggaagcggtcaacgtgattgcagaaggcgaagtgctgcaattgatgaacgtgaatgacccggacattaccgaagaaaattacatgcgggtgatttacagtaaaacggcccgtctgttcgaagctgccgcccagtgctccggtattctcgctggttgtacgcctgagcaagagaaagggttgcaggactatggtcgctaccttggtacggctttccagctcattgacgatctgctggattacagtgccgacggcgagcatctcggtaaaaatgtgggtgatgacctcaatgagggcaaacctaccttaccgttgcttcacgccatgcgccacggtacgccagaacagtcagcgatgatccgtaccgctattgaacaaggtaatggccgtcatcttctggaaccggttctggaagcgatgaccacctgcggctcgctggaatggacgcgtcagcgagcggaagaagaagccgacaaagcgatatccgcgttgcagatattgccggataccccatggcgtgaggcgctaatcggtctcgcacacatcgcggtgcagcgcgatcgttaatgccgttctcttatcccgcgtactgcgcgggatatcccattaagttctaataaactccagataccctatcgcctgtttttcacatactcatccaggatttcccctggcatattctgaatattgccgccacttacatgaactttttagaacattccttcacgaagcgttatagtatcgaacgtcgtcgggttgttaaaaccgtaagtgattaatctaaggagtgatggatgtatggaaagcaagcttattgactggcatccggccgatatcattgccggactacgtaaaaaagggacttcaatggccgctgagtcacgtcggaatggattgagttcatccacgctggccaatgcattaacgcgcccatggccgaaaggagagttgattatcgcgaaagcattgggaacggaaccctgggttatttggccatcgcgttatcacgatccgcgcacgcatgagtttatcgacagaacgcggcttatgagagcgcgtaataaaaacaaacagaatgtagagtaagtgcctgtaaaacaacccccgcatcgcgttcgcgggggttgttcagcgtacagaaggttattcgcctttcacgcgttcaatattcgcgcctagcgcgcgcagtttgtcttcgatgcgctcataaccgcgatcgatgtgataaatgcgatccacaatcgtcgtgccttccgcaatacagcccgccagcaccaggctcgcagatgcccgcagatctgtcgccatgacctgggcgccagagagcgtttctacgccatggcatatgacggtattgctttcaatttccgcacgcgcgcccatgcggctgagttcaggcacgtgcataaagcggttttcaaagacggtttcagtgataaagcccgtcccttccgccaccaggttcagcaacgtgaactgcgcctgcatatcggtcgggaatgccgggtgcggcgcggtacggacattgaccgccttcggtcgtttgccgtgcatgtccagactaatccagtcctcgcccacttcgatatccgcgccagcatcgcgcagtttcgccagtaccgcgtccagagtgtccggttgcgcgttacggcagaggattttgccgcgagagatcgctgccgccaccaggaaagtccccgtttcgatacgatccggcagcacacgataaacgccgccgcccagacgctctacaccctcgatcgtaatacgatcggtgccctgcccggcgatcttcgcccccagcgtaaccaggaagttagcggtgtcgacaatttccggctcgcgcgcggcgttttcaatgatggtcgtcccttccgccagcgtagcggcgcacataatggtgacggtcgcgccgacgctgaccttatccatcacgatatgcgcccctttaagacgcccttctacggaggcctttacgtagccctcttccagcttgatggtcgcacccagttgttccagaccggtaatatgcagatcaaccggacgcgcgccgatagtacagccccccggcagagagacttgtccctgaccaaaacgggcaaccagcggccccagcgcccatatcgaggcgcgcatggtcttaaccagatcataaggcgcgcagaacacgttcacctggctggcgtcaatgtgtaccgatccattgcgttccactttcgcgcctaattggctcaggagcttcatcgacgtatccacgtctttcagttttggaacgttttggatctctaccggttcttctgccagcagagcggcgaacaggatcggcagcgcggcgtttttggcgccggaaattgtgacttcgccctggagcgtcgttggcccctgtacacgaaatttatccattattgtattctcagttaagcattcatctccgctaccggcaggttacccgtagcttaaaatccgttaagtttacgatcgcgcgcccattccgccggggtatatgctttgatcgatacggcatggatacggttgtccgcaatgtactccattagcggcccatagaccgtttgctgtttcttgacccggctcatgccgtcaaacatctcgcccacggcaataacctgaaagtgactgccatcgccggagacgtggacttcctggagggagagggcattcatcagcacactctgaatttcatgattttccatgggttctttattcgtcaaatagtgaaaacagcccaacatcttagagcaaagtcgcgccgtcttaaataagcaaaagattacgctgataaatcagcgcggtaaaagtgccggatggtgctgctaacgcaacttatccggcctacggggatcatgcgaagtgtaggccggataaaccatccggcattcattacatacggggaagtacgtcttcgggcaagttatataattgcgccagcgcgtaaaccttgtcgttaacgccagacagcgacacggcattgccctgcttttttgcctggttcacaaggtgcgccagcagcgccagtccccccgtatctaccctggagatctggctcaggtcgatacgggtaacgccattcatcgcttctacgcgcgcgtcccatagcggcgccaacacgtcctgatccagctctcccgccagcaccagagtgtccgcctcacgcgtccaggtgagttgcggcgtcattactgtttctcgtccaaagtaattttctgttgagagatagatttcagttgtgcggtcaggccgtcgatgcctttagtacgcagcaggtcgctccactcattttgcttggtggtgatcatgctgacgccttccgcaatcatgtcatacgcctgccagttgccggtctgggtgttttttcgccactggaaatccaggcgtaccggcggacgaccgttgggatcgataatcgttacacggataggcacaatggtcgcatcgcccagcggttgctcaggcgctatctggtaagtctgaccgtggtacatcgccagcgcctgaccgtatgcctgtttcaggtattcgcgaaacgctgcaaaataggcttcacgctgcgccggggtcgcctctttgtagtagcggcccaacaccagcgcgccggcatattttacctgcacgtacggcagaagttcctgatcaacaacgtctcgcaggtaatccggattggcacgaattttcggctgttcgtttttcaggcgatcaaaagttttctgcgccgcctcgttcatcagtttataaggattgctctgatccgctgccgttgctgcgcttaatggcgcaatgaccagcagggccaccatcatcagtcgtttaaacatgcctcaattctcctgagattatttcgtttcgcccgcgggcgttgtggcttcagtatgaccttccgttgcggctggcgcatcgccagaattcttattgtcgtcgcctttgctgttataaaggaactggccaatcatatcttccagcaccattgcagacttggtgtcctgaatcgtactcccatctttgaggatagacgttcccagctcaggatcttcaaaaccgacgtttaatgccagatattgctcccccagcagtccggaagttcgaatactcaacgagctggtatcgggaatatggttataacgctcttcgatgtcgagcgttacgcgcggcaggtatgttttcggatcaagcgagatatcttcaacccgcccgacaaccaccccgccgatgcgtaccggggaacgcactttcagaccgccgatgttatcgaaggtcgcataaaccttataggtcggctccgtgcgcatagaggtcacatttgccgccttcaggcaaacaaacagcgccgccagcaacgctaccagcaaaaaaacgcctacccaaatttcattttttttcgtttgcatgaactcaattcccaaacatcagtgcggtcagcacaaaatccagccccagaacggccaacgatgcgtgaaccacggtacgcgtcgttgcccggctaatcccggcagaagtcggtattgcgtcataaccgttgaataacgcaatccatgttaccgtaatggcgaacaccacgctctttatcagacagttcaccaggtccatacgccagtcgacggcattctgcatcgcggaccagaagaacccggcgtcgattcccttccagcttacgccgaccagcgagccgccccagataccgaccgccacaaagataatggtcagtagcggcaatgaaatcacgcccgcccaaaagcgcggcgaaatcacccggcgcaatggatcgaccgccatcatctccatactggagagctgctccgtcgcccgcatcaggccgatttccgccgtcaacgccgacccggcccgcccggcaaacagcaacgccgcgaccaccggccccagctcgcgcagcagcgaaagcgccactaacatgccaagactggtctccgcgctgtaagtggtcagaaccagatagccttgcagccccagcaccataccgatgaatacgccggagacaataatgataagcattgacaagacgcccacattataaagctggcgcaccagcagcggcgcatgtttgcgaaactccggcttaccgataatcgcattgaataacattaacccggcgcgcccgaacgtcctgacggttttgatcccgctgtgtccgagtgctgccagcgcatttaacagcatgagtggcttaactccctgtttcgagtaaatcaaggtgatagtcgcccgccggatagcggaacggaaccggcccgtcggcaatgccgtcaaggaactgacgcacgcgcgggtccgtattctcctgcaacgcctgagcgctaccgtgagcgacgatttttttgtccgccatgatccaggcgtgatcagcaatactgagcacctctggcacatcatgcgagaccaccacgcaggtcacgcccagcgcgctgttcaattctgaaatcagcttcaccagaacgcccatggtaatcgggtcctggccgacaaacggctcatcgaacatgatgagatccggttccagagcgatggcgcgcgccaacgcggcgcggcgcgccatcccaccggagagctcggaaggcatcagttttgccgcgccgcgcagcccgacagcttccagtttcatcatcacgacgctttttagcagcggcgcgggtaaattggtgtgctcccgtagcggataggccacattgtcaaacacgttcatgtcggtaaacagcgctcccgactgaaacagcatactcatacgtttgcggacggtgtagagccgcgaacgggacatggccggcacattctcgccatcaaataagatctcgcccttatccggcgggatctgtccgccaatcaggcgcaacagcgtggttttaccgatgcccgacggccccatgatcgccgtgatcttcccgcgcggcaccgtcagggaaatattatcgaaaatgcagcgttcgccacgggaaaagctgacgtcgcgcatatcgactaaattggccgcagactgacccattgattcatccttcgtattgccttgttgaggtaaccatggcgctgaatttaaccatgggttcgacataattacagaatattaactgacagggttagcgaaagctggcattcgttttactttttagccgcataaagtcaaaattaggacttcgttacggcttccagatatcccttccaggggaccggcgagtatacctgaagaaaggactttagatgcttttagcgatggcgctactcataattggtttgcttctggtggcctacggcgccgatcgtctggtgtttgcggcctctattttatgccgtacattcggtattcccccgctgatcatcgggatgacggttgtgagtatcggcacctcgctgccggaaattattgtgtcggccgccgcatcgctacacggtcagctcgatttggccgtcggcgcggcgctcggttctaacatcaccaatattttgctgatcttagggctggcggcgctggttcgtccatttaccgtgcattccgatgttctacgtcgcgaattgccgttaatgttatttgttagcgtggtagccggttccgtactgcatgacggacagttaagccgcagtgatggtatctttctcctgcttctggctgtgctatggctgttattcattgttaaaatcgcgcgtctggccgaacgccaggggaatgacagcctcacccgcgaacaactggcggagctgccgcgcgaaggcgggctccccgtcgcgttcttatggctgggcattgcgctggtcatcatgccgatggcgacgcgcatggtaatcgataacgctacggtgctggcgaactatttcgccatgagtgaattaacgctcggtctgacagtcatcgccgtcggcaccagtctgccagagctggcgacggcgattgccggcgtgcgaaaaggcgaaaatgatattgccgttggtaatctcattggcgccaatatttttaatctcgctatcgtgctgggactgcctgcgctgatcgcgccgggggagatcaatccgctggcgtttgggcgtgattatagcgtgatgttgctggttagcgtggttttcgctttactttgctggcggcatccgcgtcagattggtcggggcgcaggtatactgctgaccggcgggtttatcgtatggctggcgatgctctattggctatcgccacttcttgttggataactggaaacggattatgtcgcatttagcgttgcaaccggggtttgactttcagcaggcaggcaaagaggtcctggaaattgaacgtgaaggcctggcggagcttgatcaatatatcaaccagcatttcacgctggcctgtgaaaaaatgttcaactgcaccggaaaagtggtggtcatggggatggggaaatccggccatatcggacggaaaatggccgccacgttcgccagtaccggcacctcttccttttttgtacatccgggcgaagccgcgcacggcgatttggggatggttacgccgcaggatgtggttatcgctatctccaactccggcgaatccagcgagatcgcggcgctaataccggtacttaaacgtctgcacgtgccgttaatttgcattaccgggcgaccggaaagcagcatggcgcgtgcggcagatgtgcatctgtgtgttaaagtgcccaaagaagcgtgtccgttaggactggcgcctaccagtagtaccaccgcaacgctggtgatgggcgacgcgctcgctgtggcgttgttaaaagcgcgcggctttaccgccgaggatttcgctctgtcgcatcctggcggcgcgctgggacgtaagctactgctgcgcgtaagcgatattatgcatactggcgatgagatcccgcatgttaataaacatgccaccctgcgtgatgcgctattagaaattacgcgtaaaaatctcggtatgaccgtcatttgcgatgaatccatgaagatcgacggtatcttcaccgacggcgatttacgtcgcgtattcgatatgggcggcgatatgcgccagttggggatcgccgaggtgatgacgccagggggcattcgcgtgcgtcccggtattctcgctgtcgatgcgctgaatttaatgcagtcccgccatatcacctccgtactggttgctgatggcgaccagttactcggtgtgttacatatgcatgatctcctgcgtgcaggcgtcgtgtagaaactcaaggataattaacgatgagtaaagcaggtgcgtcgcttgcgacctgttatggccccgtcagcccccatgtcatgaccaaagcggagaatatccgcctgctcatcctggacgtggatggcgtattgtctgacggcctgatttatatgggcaataacggcgaagagctgaaggctttcaacgttcgtgacggctatggtattcgctgtgctttgacctccaatatcgaggttgccattattaccggacgaaaggctaaacttgtagaagatcgctgcgccacgctggggattgtccatctttatcagggacagtcgaataagttgatcgcctttagcgatctgctggaaaaactggccattgcgccggaaaatgttgcctatgtcggcgatgatctgattgactggccagtgatggaaaaagtggggttaagcgttgccgttgcggatgcgcatccactgctgatcccccgcgctgactatgtgacgcacattgccggcgggcgcggcgcggtacgtgaggtgtgcgatttgctgctgctggcgcagggcaagctggatgaggccaaagggcaatcgatatgagtaaaaccagacgttgggttatcattctactgtcgctggccattctggtactgattggtatcaatctggcggataaagacgatcctgctgccgtgatggtcaacagcaacgatcccacgtataaaagcgagcatacggataccgtcgtgtacagtccggaaggcgcgttgagctatcgtctgatcgcgcagcacgttgaatatttttccgatcaggcggtctcatggtttacgcaaccggtattaaccacctttgataaggataaagtgccgacatggtcgatcaaggccgataaagccaaattgactaacgatcggatgctctatctgtatggccatgttgaagtcaacgccctggtgcctgacgctcaattacgcagaattaccaccgataacgcgcagattaatctggtgacgcaggatgttacctcgaacgatctggtgacgttatacggcacaacatttaactccagcggactgaaaatgcgcggtaacttacgcagcaagaacgccgagctgattgaaaaggttagaacctcttatgaaattcaaaacaaacaaactcagccttaatcttatgcttgccggctcgctgctggccgccagcattccggctttcgccgtcacgggcgataccgaacagcctattcatattgactcggatcaacagtcgctggatatgcaaggcaacgtcgtgacctttacgggcaacgtggtgatgacccagggcacgattaagatcaacgccgataaagtcgtggttacccgccctggcggcgaacaggggaaagaggtgatcgacggttacggcaatccggccaccttctaccagatgcaggacaacggtaagccggtgaaaggccacgcttcccatatgcactacgagctggcgaaagattttgtggtgctgaccggcaacgcttatctggagcagcttgacagcaacattaccggcgacaaaatcacctacctggtgaaagagcagaaaatgcaggccttcagcgagaaaggcaaacgcgtcaccaccgttctggtgccgtcgcagttgcaagacaaaaacaaaggccagactccggcgcaaaagaagagtaactaattcgttatggcaacattaactgcaaagaatctggcgaaggcctataaaggccgtcgcgtagtggaagatgtcagtctgaccgttaactccggggagattgtcgggctgctcggtccaaacggcgcgggtaaaaccaccaccttttatatggtcgtcggtatcgtgccgcgtgacgcaggcaatatcatcatcgatgatgaagatatcagtctgctgccgctgcacgcgcgcgcgcgccgcggtatcggctatttgccgcaggaagcctctattttccgccgtctcagcgtatttgataacctgatggcggtactgcaaattcgtgacgatttgaccgcagaacagcgagaagaccgcgccaacgagctgatggaagagtttcatatcgagcatctgcgcgacagcatgggacaggcgctgtccggtggtgaacgccgtcgtgtagaaatagcccgcgcgttggccgctaatcccaaatttatcctgctggatgaaccctttgccggcgttgacccgatttccgttatcgacatcaaacgcattatcgagcatctgcgcgatagcgggctcggcgtgctgatcaccgatcataacgtccgtgagacgctggcagtctgtgaacgcgcctatatcgtgagccagggccaccttattgcccacggtacgccgacagaaatcctgcaagacgaacacgttaagcgtgtatatcttggggaagacttcagactctgatagggtagagggctatgctgctctagcgggagaaaacgactctgaatatgaagcaaggtttgcaactcaggcttagccaacaactggcaatgacgcctcagctacaacaggccatccgtctgttgcagttgtctacgctggaacttcagcaggaactccagcaagcgctggaaaataacccgctgcttgagcaaaccgatcttcatgacgaaatcgacacccagcaacctcaggataacgatcctctcgataccgccgacgcgctcgaacaaaaagagatgccggaagagctgccgcttgacgccagttgggatgaaatttacaccgccgggacgccgtccggccccagcggcgattatatcgacgatgagctgcccgtctatcagggcgaaacgacgcagtcgttgcaggattatctgatgtggcaggttgagctaacgcccttctcggataccgatcgcgctattgcgacatccattgtcgacgcggtagatgataccggctatctcaccgtatccctggacgaaattcgcgaaagcatgggcgatgtagaggtggatctcgatgaggttgaagccgttctgaagcgcattcagcgttttgatccggtaggcgtcgcggcaaaagatcttcgcgactgtctgctgatccagctttcacaattcgacaaatccacgccgtggctggaagaggcgcggctcattatctgcgatcatcttgatctgctggccaaccacgatttccgcacgttgatgcgcgttacccgactaaaagaagaggtgctgaaagaggcggtaaacctgattcagtcgctcgatcccagacccggtcaatcgatccagaccggcgagccggagtacgttatcccggatgtgctggtacgcaagcataacggtcgctggacggtggagcttaatagcgacagtattccccgtttacagattaaccagcactatgccgccatgtgcaatagcgcgcgcaacgatgccgacagccagttcatccgcagtaatttacaggatgcgaaatggctgataaaaagccttgaaagccgtaacgacacgctgctgcgcgtcagtcgctgcatcgtcgagcaacagcaagccttttttgaacagggcgaagaatatatgaaaccgatggtactggcggatatcgcccaggccgtcgagatgcacgaatccaccatatcccgcgtgaccacgcagaagtatctgcacagcccgcgcggtatttttgaactcaaatatttcttttccagccacgtcaataccgaaggcggaggcgaagcctcttccaccgcgattcgcgcgctggtgaagaagttaattgcggcggaaaaccccgcgaaaccactgagcgacagcaagttaacctctctgctgtcagaacaaggtatcatggtggcgcgccgcactgttgcgaagtaccgagagtctttatccattccgccgtcaaaccaacgcaaacagctggtttgacccaaccgataaggaagacactatgcagctcaatatcaccggacataatgtcgaaattactgaagccctgcgtgaatttgtgacgacaaaattcgccaaacttgaacagtattttgagcggattaatcaggtatacgtggtgttgaaagtggagaaggtcacgcacatctcggatgcgacgctacacgttaacggcggcgaaattcacgccagcgcggaaggccaagatatgtatgccgccattgacggcttgattgataaactggcaaggcagttaaccaggcataaagataaactgaaacaacactaattgtccgggcagttagccagtgcaggacggcctgttgtgtgacacaacgggccatttgtacagttagcgctccgaacctggccatcaacctgacaggacaggttcttaggtgaaattatgataaataacgatacgactctacaactgagcagtgtacttaaccaggagtgtacgcgtagcggcgttcattgtcagagtaagaaacgcgcgctggaaatcatcagcgaactggcggcaaaacagctcagtttacctcctcaggtcgtgtttgaagccattctgacacgcgaaaaaatgggcagtaccggtattggtaatggtatcgccatcccgcacgggaaactggaagaagataccttacgcgccgtcggcgtgttcgttcagctcgaaacgccgatcgcgttcgacgccatcgataaccagccggtcgatctcctcttcgccctgctggtgcccgccgatcaaactaaaacgcatctgcacacgctgtcgctggtggcgaaacgtctggcggataaaacgatctgccgccgcctgcgcgcggcgctgaatgatgaagagctgtatcaaatcattactgacaccgaaggtgagcagaatgaggcataacaactcaatggcatttatttctgtcgttgtgaggagaaacggtacatggtactgatgatcgtcagcgggcgttccggatcaggtaaatctgtcgctctgcgcgcgctggaagatatgggattttactgcgtggataacctccccgtcgtgctgttgcccgatctggcgcgaacgctggccgatcgccagatttccgccgccgtcagcattgatgtgcgcaatatgcctgaatcacctgagatttttgaacaggcgatgaataatctgcctggtgctttctcgccgcaattgctgtttcttgatgccgaccgcaataccttgattcgccgctacagcgacacgcgccgtttgcatccgctttccagcaaaaatctttctttagagagtgcgatcgataaagagagtgacttgctggagccgttacgctcacgtgcggatctgatcgtcgacacttcagaaatgtccgtccatgagctggcggagatgctgcgtacccggctgttgggcaaacgcgagcgtgaactgacgatggtatttgagtccttcggctttaaacatggtatcccgattgatgcggactatgtgttcgatgtccgctttctgcccaacccgcactgggacccaaaactgcgccccatgaccgggcttgataagccggtagccgcgtttcttgaccgacacacagaagttcacaattttatctatcagactcgcagctatcttgagctatggttaccgatgctggagaccaacaaccgcagctaccttaccgtcgctatcggttgtaccggcgggaaacaccgttcggtgtatattgcagaacagctggcagactacttccgctcgcgcggtaaaaatgtccagtctcgccatcgcacgctggaaaaacgcaaaacatgaccgtaaagcaaactgttgaagtcaccaataagctgggcatgcatgcccggcctgccatgaagcttttcgaactgatgcagggttttgacgccgaggtgctattacgcaatgacgaaggcaccgaagcggaagcaaacagcgtcatcgcgctgttaatgctcgactccgccaaagggcgtcagattgaaattgaagccaccggcccgcaagaagttgaagcgctggcggcggttatcgcgctgttcaattccggctttgacgaagactaaacccccccctctataccctatttcccccaacgccgtcccggtatttgatgacagtcaccccaaaaccgggcgtgttacgcctgcctgcctcttgtcccgcagccccaccctttcgtaagatttgtacatttcgtgcgctttacctatgcataaaaacattaagaaaaccttaaaaaatttcgtttaggttttgtttaagttctttgtccatactaaatttatgtgaataaatttttccaggacttgccatgatcctcttatcgaaacagactccgctgggcgccggtcgacatcgtaaatgctatacgcatccggataatgcccggcgttgcataaaagtcatttacaaccgtgaccacggcggtgataaagagattcggcgtgaactgagctactatgcgcatctgtcccgctacctgacagactggagcgctatcccccgttattacggcacggtagaaaccgattgcggcaccggctatgtctacgacatgattaccgatttcaacggcgcgccctctattaccctgaccgagttcgccgcgcaatgtcgttatgaagaggatgtcgctgtcctgcggcggctactgaaaaaactgaaacgctacctgctggataaccatattgtgacgatgtcgctgaagccgcaaaacatcctgtgccagcgtatcagcgagtcagaagtggttccggtggtttgcgacaatctgggggaaagtacctttatcccgctggcaacctggtcaacatggtgctgtgaacgcaaactggagagagtgtggcagcggtttatcgcccagcctgcgctggccgttgccctggagagggacgcgcagccaaaagacaagaaacggctggcgcttacttctcacgaagcttaatggcctgtgcttatcaggcccggacgacacagatcgcaggccggataaggcgttcgcgccgccattcgacaaaattaattaagctggttgcgcgtcataaaagattccccacccagttggcgcatctggcgcataatccacgcctgccggctacgcacatagccggaaggcgcattcgccttatagcgaatcgggttaggcagcacagccgccagtaacgcggcttcagacagactcaagcgactggcaggtttatgaaaataccgttgtgccgcagcctccacgccgaaaataccatcgccaaactccgcgatattcagataaaccgtgaggatgcgctttttgctccagacagtttcaatgcccagcgttagcccggcctccagacctttgcgcacccaactgcgtccatcccataaaaagagatttttcgccgtttgctgcgaaagcgtagaggcgccgcgaatacggctctcattccgctcattatgcgccagcgctttttcaatcgccggaacatcaaagccccagtgctcagggaacttctggtcttccgccgcaattaccgccagccccatccacggcgagatatccgccatactgacccagtcagaatgcgccacataaccgaactctccgccaagccaggcgctaatctgccgttccgccatcaccgccgaaaaaggcaccggaaccacgctaaacagcgcaatgccgccgccccaaaagacggcgagcgcagcaaggatacgtaaaagtagacggcgcaaaaacgttaacggcgcgatgcgtcgtttgctcattccgccagaaccagcacgcgcgacactaatttatcaatgccgcttgccgcctgggcgatatcctgcgccagcatataggcaggggtggtcacgaccttgttatcctcgtccacaacgatatcatcaaccgggcaaggtacgtgttcggcgcccatctcttcaagtacttcagcggtatcaatatccgtccctattgtcagacgtagcgggaagtcaaagattttcggcaacattgcgggcgcgatacagatgaatcccagcggcttgccggactggtgcatggccttcgccagcgcgacgacatcgctatccacccggcattcgctcccctggctggcgaaattactcaggttcttcgccgcgccgaaaccaccaggcacaatgagcgcatccagctcctctggctgagcctgggacaggggacgaatatcgccccgcgtaatacgcgccgcctcaatcaggacgttacgcgtttccgccatcgcttcgccggtcaggtgattaataacatccgcttgtggtttatccggcgcgaagcagacagcctgcgcgccgctgcgggcaatggccagcagcgtcagaacggcctcatgaatttcggtgccgtcatagacgccgcatccgctgagcactacgccaatttttttcatggtgaacatcctcctgcaaccgactcaagcccattaataattttgattaaaatgctacgcttcacacatttaaatgattcatgtaacaaatcatttaggatttgctatcttaactgcgtgcggcctgaaaacaggactgcgcctttgacatcatcataataagcacggcgcagccacgatttccctggtgttggcgcagtattcgcgcaccccggtcaaaccggggtcattttttttccgcgtttgccacccaggctttcagcaccgcgacatcgtgctgccactcctgcttcatctcttcaatccattccgcgacattatcttcccaggcgggaagatccggcgactggatttgctggccaagttgttgcagatgacgcagccctaccgaaccggcggcgcctttaatcttatgcccttcctcaacaacgccttttttgtcacgcgccgttagattggactccagcacgcttaaatagccaggcatcattttttcaaacaccgcgagaccgtcggtgatcaatttaggcccaaccaactcgatgtattgttccagcatcgggatatccagcagcgcttgcgctttatcgctctcttcaggcgtcacggtactctcctctttatcggtggcatcccagaattttttaatcatcgcggttaaggccggcaccgacagcggcttactcagcacatcgtccataccagcgtccagatactcttttttatctttcagaacgttagccgtaagcgctaccagcggcggtaaatcttcccgcgtgtggcgacgggtcagttctctggcgatatccagacccgtcatatccggtagctgaatatccagtaagaccaggtcgtattctcccggcacgaacatctccagcgccgccttgccggtcatcgcgacatccacgctgttccccagtttttccagtaccgaacgcgccacgatcacgttcagttcaatatcttcgaccagcagaacatgcagcgcgggcagcggcatgtcgtcttcatcaaaggcgtcctccacctcttccgccaccgctggcgcatgaaccgttagcgtaaaggtcgatcctttgcccggcagactggaaacggtaatatcgccgcccatatttttcgccagccgacgggagaccgccagcccgataccggtccccgtcgccggtttgccgccgttactgtctttcacctgataatacatggcgaaaattttatcctgctcatcctgcggaatgccgatcccggaatcttccacttcaaagtgcagcatgtcgccttcatcatagcgcgcccgcaccgtcacctggccctgctgagtaaacttcaccgcattgctgatcaaattccataaaatctggcgcagacgcgttccgtcggtaatgactttgtgcggcaacggcagcgtcggctcaagcacaaaacgtagccctttttgctgcgcctgcaaaccggaaaggttttccagatcggccataaagctggtgaaatcaatgggttggttatcaagctgaaccttacgccgctccatcttatccatatcaatgatatcattgaaaatattgcctaacgtcacggcggagacatggattgtcttaaggtatttttcctgttcggcggtgagatcggtatccagcaggatgcggcttaaaccgacgatgccgttaagcggggtgcgcagctcatgactgatggtagagataaacgtggtcttgtcgcggctggcgcgctccagcgcgtcctgataacgcttacgttcggtaatatcacgaccaaatcccatcaggccatgacgtttaccgacacggtcgtaataaggcactttacgaatttcaaagcaggcctttcgtccgtccgggtaatccagccactgttcgtaggtcagggagacgttatggcggaatactttttcgtcggtttcaatgactttctccgccgcttcgggagagtacacatcttccggcttcaaatgcaccagctgtttttcgctcttgccggttagcaattccattgcgcggttacagccggaaaattctttatcctcattacgataaaaaaccaaatccggcgaggcgtccagaaaggagcgcagaaaagaggattgctgttctagctggatttgcgcttcttcacgctctttaatttctacttttagctgttcaaatgtctcttgcagctccgcttccgctttttcgcgatcggcaatttcctgattaagctgggcaatattgtccttcaactgtacgttaagcttgagatcgcgctcgcgcatctcctccagcttttgcaccagacgcgacagtcgctgccttgactcttccagttgttcaacaacaacggataagaaatagaccgcccagggcgtaattaacaggccaaaaaagatggaacgaataacgtcgatactttcaacctgaccatgcagcaccatggtcaccgccatctgcacgacaatcgccagcaccaccaatgccaacgccaggagcatggaaaagcgcaccagacccaatttcatcatcaggtcgacatagtattgcgccagcatacgaatttgcttcatagaggattccttcaccacaacttcgcacataatacccaattatgggaaccgcgttgaatattgtgcgaaatatgcgtagcgcccctcatcacgctacgctacaggtggtatccagggacgggccagcgcagagccctgtacgccatgctcattcaggtatttgtccagctcaaccatccccgtccagcgattctcgcaccacagcggggcaagcagcgtcggacggcgagcgctggctgaaattcggtgataaattacctccggcggcgtatgacgaatcatctcacctgccgttagcgtgtagtcgtccagttcgatgccgttcagccgccccgcttcccaggctttggccatcgtactgcctttcacaatatgcagcggatgcagtttaataccatcaacgcccgtctccaccacacgctccatggtttgcaggcattctgcctgcccttcgcccggcagccccacaatcagatgcgcacacactttcagcccgcgctcccgggcaatccgggtggtacgctgatagcaggcgaagtcatgcccgcggttaattcggcgcagggttttatcgtgtgcggtttgcaatcccagttccagccacacctcgtagccttgatctttatattcacacagtaaatctactactgcctgcgggacgcaatccggacgcgtaccgacgcataacccgacgatactggcctggctgaccgcctgttgatacatggaacgcagcacctgcacttctgcaaaggtgctggtgtaggcctggaaataggccagatagcgtttagcgcggttcaccagatgcgcctgatgcgcaagctgctcggcaatcgaatgatgctgctgcgcctcatcggcaaaagaggcgacattacagaaggtgcaaccgccacgcccgatggtgccgtcgcgattagggcagctaaaaccgccatgaagcgtcagcttatgaaccttttgcccataccgacgtaaaagatccccaccaaacatattgactaatttctgtaactgcataatctgatagaccgcctcttaaaaagaggccaaagcctgccatttttagtctcctttggcgatgacctggatcaatcgtcccggaaggcttttatccattgcataatcaagcaaaataaacgatatttcattcataatcccgctgatgatttttcctgatattcccctcttttttcagcgtttgctgggtcatcgataaaaacagtagcattcaatactgctcacgcttaaaacagcataaaatgccaagatttttgaaaaagcaaggtcagataatgcctggcgagcggctcttatagtgagacagatcacaggctttctgccgctccgtattagcagcccttctataaaaaaccttttaatttcaaaagattcaaaaagttatctgtgctacagcacacttttgcataaatcagtttgccatttgacctgggtgtggattcccgataagttggggatccgctggaagctttctggatgagccgtctgctcatcatatttatgcagtaattgagattccctcttaaccgtatttaccaatgcgcaaaggacacaaagagggcgaatgcgaggtaagcgtatgatgcgccagccccgtcgccatgctcttgctgtgcccgcgcgccgtcggttgggagagcgtcccgtagagcctggggaggttcactgatatgttgtacgataaatcccttgagaaggataactgtggtttcggcctgatcgcccacatagaaggcgaacctagccacaaggtagtgcgtaccgccatacacgcgctggcccggatgcagcaccgtggcgcgatccttgccgacggtaaaaccggcgacggttgcggcttgctgttacaaaaacctgaccgtttctttcgcatcgtggccgaagagcgcggctggcgcttagccaaaaactacgccgtcgggatgatatttttgaataaagatcctgaactggccgccgcgtcacgccatattgtcgaagaagaattacagcaggaaaccctgtcgattgtcggctggcgcgatgtgccaaccaatgaaggcgtgctcggtgaaatcgccctctcctccctgccgcgtattgagcagatttttgtcaacgctccggcgggctggcgtccgcgtgatatggagcgccgtctgtttatcgcccgccgacgcattgaaaaacgcctgcaggacgacaaagatttctacgtatgcagcctgtcgaacctggtcaacatttataaaggtctatgtatgccggcggatctgccgcgcttctacctggatcttgcggatctgcgtctggaatcggccatctgcctgttccaccagcgcttttccactaacaccgtgccgcgttggccgctggcgcagccgttccgctacctggcgcataacggcgagattaacactatcaccggcaaccgccagtgggcgcgcgcccgtacctataaattccagacgccgctgatcccggatttacagtccgctgcgccgtttgttaacgaaaccggttcggattccagctcgctggacaacatgctggaactgctgctggcaggcgggatggacatcatccgcgccatgcgcctgttggtaccgcccgcctggcagaacaaccccgatatggaccaggatctgcgcgccttctttgactttaactccatgcatatggagccgtgggacggtccggcaggcatcgtgatgtccgacgggcgcttcgccgcctgtaaccttgaccgtaacggcctgcgcccggcacgctatgtcattaccaaagataagctgatcacctgcgcctccgaagtcggtatctgggactatcagccggatgaagtggtcgagaaaggccgcgtcggcccaggcgagctgatggtgatcgacacccgcggcggacgtattctgcattccgcggaaaccgatgacgacctgaaaagccgccatccatataaagagtggatggagaaaaacgtccgccgcctggtgccgtttgaagagctgcctgatgaagaagtcggtagccgcgaactggacgatgacctgctcgccagctatcaaaaacagtttaactacagcgccgaagagctggactcggttatccgcgttttgggcgaaaacggccaggaagccgtcggttcaatgggcgacgataccccctttgccgtgctctccagccagccgcgtattatttacgactacttccgccagcagttcgcgcaggtcactaacccgcctatcgacccgctgcgtgaagcgcacgtcatgtcgctcgccaccagcatcggtcgcgaaatgaacgtcttctgcgaagcggaaggtcaggcccatcgcctgagttttaaatcgccaattctgctgtactccgatttcaaacagctcaccaccatgaaagaggagcattatcgcgctgaccgtctggatatcaccttcgacgtgaccgaaaccacactgaacgcgacggttaaggcgctgtgcgataaagcggaacagatggtgcgcaacggcaccgtgctgctggtcctctcggatcgcaatatcggtaagaatcgcctgccggtccccgcgccgatggcggtgggcgcggtgcaaacgcgtctggtagaacaaagcctgcgctgcgacgccaacatcatcgtagaaaccggaagcgcccgcgatccgcatcactttgcggtactgctcggctttggcgcaacggctatctatccgtacctggcctacgaaacgctggggcgtctgattgatacccaggccatcgccaaaaactaccgtaccgtgatgcagaactaccgtaacggcatcaacaaggggctgtacaagattatgtccaaaatgggcatttcgaccattgcctcttaccgctgctccaaactgtttgaagcggtcggactgcacgatgatgtggtaaacctgtgcttccagggcgtggtcagccgtatcggcggcgcgagctttgatgacttccagcaggatctgctgaatctctccaaacgcgcctggctggcgcgcaaacccattagcccgggcggcctgctgaagtacgtccacggcggcgaatatcacgcctataacccggatgtcgtgcgtaccctgcaacaggcggtacagagcggcgagtacagcgattatcaggaatacgccaaactggtcaatgagcgtccggcgtcaacgctgcgcgatctgctggcgatacatccagacggcgaggcggtgactatcgacgaggttgagcccgccagtgagctgtttaaacgctttgataccgcagccatgtctatcggcgcattaagtccggaagcgcacgaagcgctggcggaagcgatgaacagcctcggcggcaactccaactccggcgaaggcggcgaagacccggcgcgctatggcaccaataaagtgtcgcgcatcaagcaggtggcttccggccgctttggcgtgacgccagcctacctggtcaatgccgatgtgattcagattaaagtcgcgcagggcgcgaaaccgggcgaaggcggtcagttgccgggggataaagtcactccgtatatcgctaaactgcgctattcagtgccgggcgtgacgctgatctccccgccaccgcaccacgatatctactctatcgaggacttagcgcagctcattttcgatctcaagcaggtcaacccgaaggcgatgatctccgtgaagctggtatccgaaccgggcgtcggcaccatcgcgaccggcgtggcgaaagcctatgcggatctgatcactatcgccggctacgacggcggtaccggcgccagcccgctctcttcagtgaaatacgctggttgcccgtgggaactcggacttgttgaaacccagcaggcgctggtcgccaacggtctgcgtcacaagattcgtctgcaggtggacggcggtctgaaaaccggcgtcgacatcattaaagcggcgattctcggtgcggaaagtttcggcttcggcaccggcccgatggtggcgctgggctgtaaatacctgcgtatctgccacctgaataactgcgcaaccggcgtagcaactcaggatgacaagctgcgtaagaaccactatcacggcctgccgttcaaagtgactaactactttgaatttatcgcccgcgaagtgcgcgagctgatggcttcgcttggcgtgacccgcctggtggatttgattggccgcaccgacctgctgaaagagctggagggcttcaccgctaaacagcagaagctggcgctgtctcgtctactggaaaccgctgaacctcatccgggtaaagcgctgtactgcaccgagaataacccgccgtttgataacggcgtgctgaatgcgcaactgttgcagcaggcgaaaccgtttgtcgatgcgcgccagagcaaaaccttctggttcgacatccgcaacaccgatcgttccgtcggcgcgtcgctttccggctacatcgcacagacccacggcgatcaggggctggcttccgatccgattaaagcacacttcagcggtaccgcaggccagagctttggcgtgtggaacgcgggcggcgtagagttatatctgactggcgatgccaacgactatgtcggtaaaggtatggcaggcggtttgattgccatcagaccaccggtaggttccgccttcctcagtcataaagccagcattatcggcaacacctgcctgtatggagccaccggtggccgtctgtacgcggcgggccgcgcgggcgaacgtttcggcgtgcgtaactccggggcgattaccgtagtagagggcatcggcgacaacggctgtgaatacatgaccggcggcatcgtctgcgtgttgggtaaaaccggcgttaacttcggcgcggggatgaccggcggcttcgcctatgtgctggacgaagatggcgaattccgtaaacgcgtgaacccggaactggtagaagtactggacgttgattcgctggctatccacgaagagcatctgcgcggtctgatcaccgagcacgtgcagcatactggttcgcaacgcggcgaagagatcctgtccaggtggtcaagcttctcaacccaattcgcgttagttaagcccaagtccagcgatgtcaaagccctgttgggccaccgtagtcgtagtgcggcagaattgcgcgtgcaggcgcagtaaggaattgaaatgagccagaatgtttatcaatttatcgacctgcagcgcgttgatccgccgaagaaaccgctgaagatccgtaagatcgaatttgttgaaatctacgaaccgttttctgaaggtcaggcgaaagctcaggcggatcgctgtttgtcctgcggtaacccctactgcgagtggaaatgtccggtacataactacatcccgaactggctgaaactggctaacgaagggcgtatttttgaggcggctgagctatcgcaccagaccaacaccctgccggaagtgtgtggccgcgtctgcccgcaggaccgcctgtgcgaaggctcctgtacgctgcacgatgagttcggcgcagtgaccatcggtaacattgagcgctatatcaacgataaagcgttcgaaatgggctggcgcccggatatcaccggcgtgcgccagacggacaaacgggtagcgattatcggcgcaggtccggcagggctggcgtgcgccgacgtgctgacccgcaacggcgtgaaggcggtggtctttgatcgccatccggaaatcggcggcctgctgaccttcggtattccagctttcaaactggaaaaagaggtgatgacccgccgtcgcgagatcttcaccggcatgggtattgagttcaaacttaataccgaagtgggtcgtgatgtacagcttgaagatctgctgaaagattacgatgcggtattccttggcgtcggcacctatcagtcgatgcgcggcgggctggaaaatgaagatgcggacggggttttcgacgctttgccgttcctgatcgccaatacgaagcagatcatggggtttggcgaaaccagcgacgaaccatatgtcagcatggaaggcaaacgcgtggtggtgctgggcggcggcgataccgcaatggactgcgtacgcacttccatacgccagggcgcaacgcacgtaacctgtgcttatcgtcgtgatgaagagaacatgccgggttccagacgcgaagtgaagaacgcgcgcgaggaaggtgtcgaatttcagtttaacgttcaaccgctgggcattgaagtcaatgccaacggcaaagtgagcggcgtaaaaatggtgcgcactgaaatgggcgaaccggatgccaaaggccgtcggcgggcagagatcgtcgccggttccgagcatgtggttccagctgatgcggtggtgatggcatttggttttcgtccacacagcatggaatggctggcgaaacacagcgtggaactggactcgcagggacgaattatcgcgccggaacgcagcgataatgctttccagaccagcaacccgaaaatcttcgccggtggcgacatcgtgcgcggttccgatctggtggtgacggcgattgccgaaggccgtaaggcggctgacgggattatgaactacctcgaagtgtaacccttccggctccccgcttactgccttggctgatggctggggagccgatattcctctcctcaatatctctcctgccgattctggaaacccgctcgtaaatcgagatgtaatgccatgtaaaatccgctcatggattgatccgtttacgcctgaagcgtattgatagcgttctaatttcacaatgaaactatcacgtaagggatgacatgacgaatccaactttagcgccacagtctgatgaatatcagcaaatccataacggaattgttcaactgctggacacagcgcggacacaaaccgttcgcagcatcaacaccatcatgacagcaacctattgggaaatgggtcgacgcattgttgaatttgaacaaggcggtgaagccagagcggcttatggtgaacagctaattgatcgtttatcacaggatttaagccaaagatataaacgaggtttttctgccagtaatctatggcaatttaaaaagttttatctttattttcaaaaaattgagattctccagacagtgtctggagaatctctccatttggcgcaactggctaaatctttcccactcccctggtcggcgtatgtccgcctcttgtcggtaaaaaatcccaatgcccgcactttttacgagaaagagacgctacgtaacggctggtccgtacggcaactcgatcggcaaatcgccactcaattttacgaacgaacgctactgtcccacgacaaatccgccatgttgcagcagcctgcacccgccgagccaaacgttttgccggagcaagccatacgcgacccgttcattctggaatttcttaacctgaaggacgagtattccgaatcagacctcgaagacgcgctgctcagccacctgatggactttatgctggagctcggtgacgattttgcttttgttggccgccaacgccgactacgcatagacgatagctggttccgcgtcgacctgctgttcttccatcgtcgcttgcgctgcctgttgctcgttgacctgaaggtaggcaaattcggttatgcggatgccgggcagatgaatatgtacctgaactatgccaaagagcactggacaatgcccggagaaaacccgccagtcggcttagttttgtgcgcagggaaaggcgcgggggaagcacattacgcgctgactggcctgccaaacaccatcatggcgagcgagtacaaagtgcagttgcccgacgaaaaattactcacagacgaacttattcgttcgcaaaccatgctggaaactcaactcacacgcggtggttcactgacaacggagaaaaactaacgaaccattaatgccatgaataattatcaaaaaaaatatcacacgaaaacgtttgctttattctggaaactgtatattatgcggcggattttttgggcaaaattcatggaggcgttgtgtcgcaggacaacaattatagccagggccccgtccctctggctgcgcggaagggcgtgattccactgacgtttgtcatgttgggtttaacgtttttttccgccagtatgtggaccggagggacactcggcaccggtctttcttataatgatttcttcctcgcagttctcttcggtaatctcctcctcggtatctacactgcatttcttggttacatcggcgcaaaaaccggactctccacccacctccttgcacgttactcctttggcgttaaaggctcatggcttccctcgctactgctaggcggtactcaagtgggctggtttggcgttggcgtagcgatgttcgctattccggtcagtaaagcgacgggcattgatgccaatattctgattgccgtttcgggtctactgatgaccctgaccatttttttcggcatctcggcgctgaccattttgtctatcgttgccgtacccgcgatcgttattctgggcagctactccgtctggctggcggtcagcggcgtgggtgggctggagcatttaaaaacgatagtgccgcagacgccgctggatttttccagcgcgctggcgctggtggtgggctcgtttgtcagcgccggtacattgaccgccgacttcgtccgcttcgggcgtcatgccaaaagcgccgtactgattgcgatggtcgcttttttcctcggcaactcgctgatgtttatctttggcgcggcaggcgctgccgccgtcggtcaggcggatatctctgacgtgatgatagcgcaggggctgctgctgcccgcgattgtggtgcttggcctgaatatctggaccaccaacgataacgcgctgtacgcatcgggtctgggcttcgccaatattaccggtctttccagccgtacgctgtcggtggtgaacgggattatcggtaccgtgtgcgcgctgtggctttacaataattttgtcggctggctgacgttcctgtcatctgccatcccaccgattggcggagtgattattgccgactatctgttgaaccgccgccgctatgccgacttcaacaccgtgcgctttattcccgttaactggattgctattctttccgtcgcgctgggcatcgccgccggacattatgttccgggtattgtgcccgtcaacgccgtactcggcggcgtcttcagctatatcctgctgaatccacttttcaaccgcagccttgctaaatcaccagaggtcagccatgcagaacaataacatcaccattcgtcagacgcgtctgcagggacacgaaggattatggcagattacgattgaaaacgggcgctttagccggattgagcctcaggaagccgcatcgttaccgcagggcgaagtgcttgatgccgaaggcggtctggctattccaccgtttgttgagccacatatccacctggataccacgcaaacggcgggtgaaccgagctggaaccagtccggcacactgtttgaagggattgagcgctgggcagaacgtaaagcaatgctcacgcatgaagatgtgaaagcgcgcgcgatgcagaccctgaaatggcagatggctaacggcatccagtacgttcgtactcacgttgacgtttcagatcctacgctcaccgcgctgaaagccatgctggaagtgaagcaagaggttgcgccgtgggtagacctacaaatcgtcgcctttccgcaagaaggtgttctgtcttatcccaacggtgaagcgctgttagaggaagccgtgcgtttgggcgctgacgttattggcgccattccgcactttgagttcacgcgggaatatggcgttgaatcgctgcacaaaatctttgcactggcgcagaaatacgatcgcttgatcgatgtgcactgcgacgaaattgatgacgagcagtctcgctttgtcgaaacggtcgcggcgctggcgcatcgtgatagcatgggggcgcgcgtgaccgccagccacaccacggctatgcactcgtacaacggcgcgtatgcgtcacgcctgttccgcctgttgaaaatgtcggggattaacttcgtcgccaacccgctggtgaatattcatctgcaagggcggtttgacacttacccgaaacgtcgtggcgtcacgcgggtgaaagagatgctggaagcggggatcaatgtctgctttggccatgatgacgtcttcgacccgtggtatccattaggcaccgccaatatgctgcaggtgctgcatatggggttacacgtttgccagttgatggggtatgggcaaatcaacgacgggttaaatctgatcactatccacagcgcaaaaactttgcacctgcaggactacggtctgagcgtcggcaatgccgcgaatctggttatcttacccgctgagaatggattcgacgcggtacgtcgccagacgcctgcccgttactcgattcgccacgggcgggtaattgccgagacggtgccgagccagacgacgctgcacctgacccagccggaagccgtgacgtttaagcgttaacccgtcatacccgcgctctccggcacattcaccacgcagccccgtaaggggctgcgttcggaagactgctccggcaagagattcaggccgccagcagactggcgcgtactttcactaccactttcttgatgtcatccggctcacccactgcacatcccggtttatgcggttctcccggcataaacacagcaaacatccccgcttgcagcgtaatagtctgctcgtcgacaatttgactacaaagctggtaatcctcttcaacgtgcatctcctcgcactggcgagcggcaccggacatcccaaacgcaatacgctcgacgccggttagtagtagctgaatatcaatgtattgttcatgcaattccgctttcttctcggccggcatttgcgtcgttaactgcattacattcataaagacattgtcgccctgcaattcatagcgccccggcgctttctcctgcggccttgccgccagcgcgagagtcaaggcatccaacaatcgcggatgcaacccgcaagaaggcaacgactgtacttcccccatcatcataatgtgtctccttgagctaacaacgcagcgcctaataatcctgcgtcatgccgatagcgagcggcgctcagcgccacgtgataaggcgcaggctcttgcatcaaaaacgcgcgaacctgctccaggtatccctcagctaaccctacgctgccgccaatgaccacacactggcagtcggtagtcgctttcacatcggcgatcattcgcgctattacctgcgcggattggcttaccagatgtcgcgcctgctgatgaccttcgccagcgcgaataaatagggttttggcgtcgcatcccgccagatcgtcccgcgccgccgcggccatccctcgtccggaggcgatggcctctacacaaccaacgcgtccacagccgcatacgggcccgtgtgggtccgccagggtgtgtcccaggtgcccggccagaccgccttttccggtaaggagcttgccgtcgcagacaacgccgccgccaacgccggttgaaacggtgataaataccatatcgcggatatcatcagggagcgcgtgatactccgcccaggccgccgcctgcgcgtcgttcaccgccagcgtcggcaggccagcgatcgcttccagtgtttgtactaacggaaagtgtagcaagccgcccagattatgggggtttagcgccagcagcatcccttcctgaatgatcccggtagaagctatcgctacctgacgcgcctctgctcgtagtggttcaaccagcgcctttaatgcttcacgtaacgcatccggcgttttgctcgcgggggtcggtagctcgcgacgctggctaatgcgcaagttgttgtcgatgagcgcggcggcaagtttagtaccgccaatatcgattgctaacgtagtcatgacgccgccttttttaatgcgtcgttataccatccacagatatgttccagacgggtaatggcggaccccaccgtcaccgcccatgcgccatagcggatcgcctccgccgccagtgctggcgagttatagcgcccttcggctattacccggcatccggcgtcatgcaacgctttgactaagggcagatcgggttcctccggcgtatcgggggtggtgtagccggacattgtcgtgccgataatgtccgcgcccaaccgttggcaggcgagaccatcgtccacggatgagcagtcggccatcgccagtagatggtggtgatgaatgcgcgccaacaacgcctcaacggctaccggccgttgccgagcggttccatcaacggcgataatagctgcgccggcctgcgccagcgcatctacatcgtcgagaaaaggggtaatgcgcactggagactcatccagatcgcgtttgataatgccgataatgggtaccgaaacgagcgagcgggtcatacgcaggttgtctatgccttcaatacgcaccgcaaccgcgcccgcctgttccgctgccaacgccattgccgctacaatctccggcttatccagcgggctgcccggaacgggctggcaggagacaatcaggccgccagaagcggcaatatttttatccagttgttcaagtaacgacatactactcccttacaaatattgcccggttgaaaaccgggcaagcggattaacttttcgtttttacaaaggcacctttaccactgccaagcggtacggctccgctgaacggtttgtcgtcgatagcatcatgggtgcgtaacgcttccggacgtagccaacgctgtacgcgagacggcatatcaagcccaataagcaggatcacgacaaacgtcaggctgaaagagagcgatgccagcgcagtgcccagatccagacgttgagcgatcagcgctcccaggatcggcgccagcgcgccgccgagcgcgccgacgttataagtaaagcccagccccgccgcgcgctgatcggtatcgaagtaaccgccgatcagtttcggcagaatcccggcaatcccctgccccaacatctgttggaaaaacagtagcagacccagaacccagacgtttgtgccgccaatcgcaaagaccggaataatgaggatttgcgaggccagcaggctacagacatatgctttacgcgttcccagccagtcgccaagaaaaccgcctacgcagcaaccaaccgccgcgccaaatccgctaaagaacaggacattcgccaccgtatgcggatcgtaggccagctcggttttcagataagtgggtaatagcgcctgaatcggccaggaatagaggaaagcaaacagtaccaccagcatcagcatgacgccagtgggccagcgtttaccgctgctctgcaccataaagctgataaagataaccgcgcacagtagtcccagccccgccacaatcgcagcattttgtaggttaccggcaaaacagaaccacagcgcagcggcggcggcgaaagtcattaaaatgttgatgatgcgatgttcgccccgataaagaatgtcgaccatcgtacgtaccggcgctttacccgcgtgtttctctttccagtcttccgcttccggaatgtttttccgcagccagagagcgaagataattggcaaaatgccaatgaaaaacagcgcgcgccagccccagacaggcaccaccaggctgtacacctgcgcggcaacgaccgcgccgacggagaagccggaaatcagaaaaccgctggctttattgcgtaaatgttttggccagctttcaatcacataggtcgcgctggaaccatattcgcccgccatgcccataccaatcaccagtcgggcgatgaacatggtggtgtaaccgggcgcaaacccgcatgccagggttcccaccgaaaacagaatgatgctgctgaccatcgccagacgacgcccatagcgatcgcccatcgcgcccagtaataacccgccgaaccagcgagagataaaagccgcagaaatcaggcttgccgcctgtaccgtcgtcagcccaaattcgctttgtacctcagtcagtacaagagcaatcaacacaaaatcaaaaccatcaagcagatatcccagccaggcagcggaaaatgcccgccactgcgcccggttgagatggcgataccacgggatgttctgggtagaagtactcattttactctcccgacgatttttgttgtcgttatgccgaatggcggctccgccttatccggcctaccgctcacactgttgtaggccgggcaagcgtagcgcccccggcattatgctgttacgccttttcttccatcagttgttgagccagcgccttgagcgccggcaggtatttttcatcaacaggcgcgaacggtttacgacacagcggcaccgataccacgtccatataatgcaggaccgttttcaggccgcggaatacgccggttttaatcagtaaatcaataaccttattgcactcggtttgcagacgctgcgctttcgccacatcgccctcacgtaatgcctgcacaatcccctggtaacgccagcccataatgttgtatgtgctgccgataccgccgtccgcgcccgccagcaggccggaagcgaagatttcgtcataaccgttgtacagcaccagatccggatgcgcgcggcggatctgctccatctggaagagatcgccggaggtttgcttcagcgcgctcacgcccggtaatgtcaccagcgtattgatctgatcgagggtaagttttacaccgcttaacgccggaatgttgtataccaccatcggcaatccatctgcggaatcaatgattgcccgataatggtcacagtgctcttcaaaactgaaagggtaataaaaaggcgtcaccgcagagaccgcatcaaaaccgtaacgctttgcggcgctggcaagctgctggctttctgcggtgcttactgtcccgacatgggcgatcaacgtgatttttcccttcgcctcttcggcgacaatctccagtacctgctctctttcagcaaggctctgtacgaatgcttccccggtggaaccgccaacgtacagcccgtcgataccctgcccgatgttaaaacgcaccagacggcgcaggctttcgctatccagttgctgctgatgatcaaatggggtcaacaacgccgccattacgccttgcaatgcttttgccatacctacctctacggatgatgaatatattaactacctacctttatacctgttataccagatcaaataagcagcaaataatacagaacgcttatagtgcgatctgcttcactaaaccgggatcggaggtgcgatcgctaccgcattttttgactttttttaccgagcgcgtgccaggtagcggaaacgctattgaggtgggtttgcagagcgcgatccgctttatcgggatctcgctggcgaatggcatcaacaatcacaatatgttgttgataactcacgttattatgttcatgcagctcacgatcgggaacgcttgggcgagcggcgattagccagtccagcagagcaacatgaatagccataaagatcggattgccgggaatttcagccagcacccggtgaaactcgacatctgaacgaataaacagcgcgttgtcatccagcgactggctattaatttccagcgctttcgttaacaacgcgatctgctcgtcggtagcatgttccgccgcatagcgtaccaggctggattcaaagaaaagccgtagctgttcaaagtgagcgatgccgccaggatgagtaagaaaatctttcgccatacccgacagttcactgatgatggtatcagcggaggggcgcgagacgcgggcgcgttcgccgttattgatttgcaccagacctttacgcttcagcgcagctaacgcttcacgcacggagggacgtcccacattgaagaaggccattaattcacgttcagacggtagctgttctccctcgccaaactcatgacggcggatcatctgctccagctcttcctcaaccatttcagacagttttttacgcgccagcgggcggcggcgcaaactacgcccgagggatgtcggagaatcttctgcttgcgaatcaaatgcgttcataacgtccattcatgagtggtcggtggcaaataatagcaagcttatcgtaacacagctttaaaagcagggtgaacccgagaggagaccaaacaaaacaggcccttcagggcctgttgattattttactacacgcagcgccggacgtccgccacgcggcggaggcggctcgtcatcaggactactgtcgtcatcgtggtcgggcttatcaccatcaatgacggacatcacggtctcgctttccgcgcctgcggtattgtcatcatcatttaagctgacaacgtcttcatcataggcggcttcaggctcaaacatggtgcctgcgccattttcacgggcgtaaatcgccagcaccgcagccaaaggcacagaaacctgacggggaacgccgccgaagcgcgcattaaaacgcacttcatcattagacagctccagattacctaccgctcgcggcgcaatattgaggacgatttgcccatcgcgcgcatattccatagggacatgcacgccaggcagcatcacatccaccaccagatgcggggtcaactggttatccagcaaccactcgtagaaagcacgcaacagataaggacgacgcggcgtcaactgtgacaaatccatacaggttaaccccgaccgaggcgcatttcacgttcagcttcggttaaagaagccaggaaagaatcacgttcaaagacgcgggtcatatagcctttcagctctttcgcccctgcgccgctgaattcaatacccaactgcggtaaacgccacaggagaggcgccaggtagcaatcaaccaggctgaattcgtcgctcaggaaatacggtttctgaccaaatactggcgcaatcgccagcagctcttcacgcagttgtttacgtgcagagtcggcctcggaagcagacccgtttacgatgacgttcatcagcgtataccagtctttttcaatacggtgcatgtacagacggctttcaccgcgcgcgaccggataaaccggcatcagcggcggatgagggaaacgctcatccagatattccataatgatgcgagattcccacagggtcagctcacgatccaccagtgtcggaacgctttgattcgggttgaggtcaatcagatcctgaggtggattgtccttttccacatgttcgatctcaaaactaacacccttttcagccaacacaatgcggacctgatggctatagatgtcagtaggaccagaaaacagcgtcattaccgaacgtttgttggcagcgacagccatgaaaacctccaggtatattcagaatttttactgctaccagccacaatgtgaccagccagatgttatgtcacccagggcgaaaaaagccatcattgctcagaaacgagacaaaaaatgaacattccccgctatttgggcagaaaattggatgatagtttaccagattttgtgacctttgtggtgagtcgattctggaaatgaggaaaaagagatattcctggtctgaaatgctcgccccacctgagatattgtctttcgcctgttatgcctgtactaccggtgcgccccagccatcaaaactgccgccatgtttttcagccagatcggtaagctggcaagtgatttctgtcatatgccattgttgcggagcatcggtgctgataaaagacgccataaacccctgttgcgggtcattcattcgaatactgaccagcgttatgccatacggtaatgcagcaatatcttgcgccaggtcgcgcgctgcgacctctgtaggcaatgtcgcataataatcaatagcgcgcggaagcgtcagatcatcaccttgttcctgtaatccccggcacacacgggaatcgtgtatccagttccagtcgtatcgggttggatacaagaactggcggtaaaagtttcctttatcattgtgactctctctataactaaaagagatttccgggccaccagcgagcaatttatccagcgtcttttcccagttaagatcctcttccgacatgaacacaaaatcgcgccagccttgttgggtaaccacacccaccagccagatcggaaacgtcttccccttttcatcaagccagtcctctatacgatttaaactctgtgtttcatcgggctgcggtaaaccattttcataacagttggtgtaatgaacacgtaagaacccggtatggataaggcgatcaaatttttcatcctgaatggcgccgatatccacacgtatacccgtaacatggtcatccaccgttgttataaagaattcccatttattcgacagcattaacgactctttcttagtaaacaatgagttaaaaaatcccactgtgacttccttttctctgagcgtgcatgaaaaatgaataagatgagaataatgctaaagatagggaggaaaagagactggattcggactttagccataaaaaaacccgccgaagcgggttttttcgctaacagttgtctgccgaagcagaaccccattaacgtttggagaactgcggacgacgacgtgctttacgcaggccgactttcttacgttcaacctgacgagcgtcacgagtaacgaagccagctttacgcagttcgccacgcagggactcgtcgtactccatcagagcgcgggtgataccgtgacggatcgcaccagcctgaccagagataccaccacctttaacagtgatgtacagatccagtttctcaaccatgtcgaccagttccagcggctgacgaactaccatgcgggcagtttcacgaccgaagtactgttccagagaacgttggttgataacgattttaccgttgcccggtttgatgaacacgcgagctgcggaacttttgcggcgaccagtgccgtagtattgattttcagccattgcctataatcccgattagatgtcaagaacttgcggttgctgtgccgcgtggttgtgctcgttgcccgcgtaaactttcagtttacggaacatagcacgacccagcgggccttttggcagcatgcctttaaccgcgatttcaatcacacgctcaggacggcgggcaatcatctcttcaaaggtcgcttgtttgataccaccgatgtggccggtgtggtgatagtacactttgtcagtacgcttgttgccggttacagcaactttgtcagcgttcagaacgatgatgtaatcaccggtatctacgtgcggagtgtattccgctttgtgcttaccgcgcaggcgacgagccagttcagtagccagacggcccagagttttaccggtcgcgtcaacaacataccagtcgcgttttacggtttctggtttagctgtaaaagttttcattaaaagcttacccaaataaataagttacacgttggtgaacacccaaacgttttaaatagttgaggttcacacgacaaagtccggtaaacctaccccctcggatatgtttggccggcacagagaaagtttgggaaaaaactctcttgtaacgtggggtcgcaggattatagagaagtccaggtcaaagatcgacccctttttgcgatttgccgcgggttttgttcaggcctggttcaccctccggtcggggaggttgcacagatataataccgcataatgccggagcgctgcgcttgtccggcttacggcatatgctcccgcttgagatactccgcactctgcatctcttgcaggcgcgacagacagcgctgaaattcaaacttgagccgctccccctgataaatttcatataacggcgcggcagcgctgaccaccagcttaacgtggcgctcgtaaaactcatccaccagcgcaataaagcggcgcgcttcgttctccatcagcggcgtcatgaccggcacgtcaaacagcagaaccgtgtgaaataaccttgagagcgcaatgtaatcatgctggctgcgggcctcgacgcacagcgtagcgaaagagaccgctagcgtttggttttcaacgcccagggtggataaagagcgatgattgatttccagcgtcggagcgtgctcgcgcgcggcccccgctaacgccagccacagtttatccatttgccgccgggtttcatcattaagcggcgttagccataaatgggcctgcgtcagcgtccgcagccggtaatcgacgccggcgtccacattcataatgtcgcagtgctgtttaatggcatcgatagccggcaggaagcgggcgcgttgcaaaccgttgcggtagagttcatccggcggaatattggaggtcgcgaccagcgtaatgccgcgtgcaaacagcgctttcattaaaccgcccagcagcatggcgtcggtaatatcggtgacgaaaaactcatcgaaacacagtacgtccgtctcggttttaaaccgatcggcaataatgtctaacggatcgatctgtccctgtaacgcggtaagctcttcatgcacgcgcagcataaaccgatgaaaatgcaggcgtagttttcgctcgcccggcaggctgtggtagaagagatccatgagccaggttttgccgcgacccacgcccccccacatatacagcccgcgaaccggtatttgcgcgtccggttcgtttttgcctaataatttccccagtcgcgctatcagaccgccgggtggcgtagccgacgattttttcgcggtgagcgcctgataaagggtttccagacggtcgaccgcctctttctgtacgtcgtcaggctgatgggtgccttcgttgagtgcctggagataacgcgatgtaggggaaaggctttgcataatgttattgttattccttgaaaatcgatgtgccgtcgttcacggctgacgaaaaaaaggccgttctacactacgcgatatgctgtcgggattccacttctacggaattagcggttatagtggcataatcaggcgcgggcatggagcctggagccaacaccctacggaaacataagacaacgggagatgttcatgacctgggaatatgcgctaattggattagtcgtcggtatcatcattggtgccgtggccatgcgttttggtaatcgtaagttacgtcaacagcaggcattgcagtacgaactggaaaaaaacaaagctgagctggaagagtaccgtgaagagctggttagccactttgcccgcagcgcggaactgctggataccatggcgcatgattaccgccagctgtatcagcatatggcgaaaagctccagcagcctgctgccggaaatgtctgcggagtcgaatccgttccgtaaccgtctggcggagtctgaggcgagcaacgatcaggcgccagtacaaatgccacgtgattattctgaaggcgcgtctggcctgttacgtagcggcgcaaagcgcgattaatcgcacgccgttaagaaatttatcgggcgcatcgcttgcgccctctctctatctttcctgtcccagctattatcattgttaccaggctgaaaattcaataacatcaatctgttttgaattgtctatccgttcattcaaggtacgagagcagcatccatgaaaaaacacacccagctgttaagtgcattagcgttaagtgtcgggttaactctttcggcgccgtttccagcccttgcatcgataccaggccaggtgccaggccaggcgacgctgccaagccttgcccctatgctggagaaagtgctgcctgctgtcgtcagcgtaaaagtcgagggaaccgccgcccagagccaaaaagtgccggaggagtttaaaaaattctttggcgaggatctgccagaccagccgtcccagccgtttgaaggactcggttcgggggtgattatcgatgccgcgaaaggctatgtattaaccaataatcatgtgattaatcaggcacagaagatcagcattcaactgaatgacggacgcgaattcgacgcgaagcagatcggcggcgacgaccagagcgatatcgctctgttacaaattcagaatcccagcaagttaacgcaaattgccatcgccgattccgacaaactccgcgtcggcgatttcgccgtggcggtcggtaatccgtttggtcttggacaaaccgccacctccgggattatttcagcgctgggacgcagcgggcttaatctggaagggcttgagaactttattcaaaccgatgcctctattaaccgcggcaactccggcggcgcgctgcttaacctgaacggcgagctgatcgggattaataccgcgatcctcgcgccagggggcgggagcatcggcattggctttgctattccttccaatatggcgcagacgctggcgcagcagttgattcagttcggcgaaatcaaacgcggattgctgggaattaaaggcactgaaatgaccgctgatatcgccaaggcattcaaactgaacgttcagcgtggcgcttttgtcagcgaggttttacccaattcaggttcggcgaaggccggggtgaaatccggagacgtgattatcagtcttaacggtaagcagctgaatagctttgccgaactgcgttcacgtatcgccaccaccgaaccgggcacgaaagtgaagctgggcctgctgcgcgatggtaagccgctggaggtggaagtcacgctggattccaatacctcttcttccgccagcgccgaaatgatcgccccggcgttgcaaggcgcaacgttgagcgacggccaactgaaagacgggacgaaaggcgttaaggttgatagcgtcgaaaaaagcagtcctgccgcgcaggccggtttgcaaaaagatgatgttatcatcggcgttaatcgcgatcgcatcagttctatcgccgaaatgcgcaaagtgatggcggcaaaaccgtccatcattgctcttcaggtagtacgcggcaacgagaacatttatctattgctgcgctaatcctgtcttaaaccgggcatcagcctgcgatgtgatgtccggttaactcatggtatgctgctgccgttcccttttttaacgacgcctccatcatgtttgtgaagctcttacgttcggtcgcaataggtttaattgtcggcgctattctgttggccgtgatgccttctttgcgcaaaattaatcctatcgccgtcccgcaattcgacagtaccgatgagacgccagccagttataattttgcggttcgccgcgccgcgcctgccgtcgtcaatgtctataaccgcagtatgaacagtaccgcgcataatcaactggagatccgcacgctgggttccggcgtgatcatggatcaacgcggttatattattaccaacaaacacgtgattaacgatgccgatcagattatcgtcgcgctacaggatggccgcgtctttgaagcgctactggttggctccgattcgcttaccgatctggcggtgctgaagatcaacgccactggcgggctgcctaccatcccgattaatacaaagcgtacaccgcatattggcgacgtcgtactggctatcggcaacccatataatctgggacagaccatcacccaggggatcatcagcgcaacgggtcgtatcggcctgaacccgacggggcgacagaattttctccagaccgacgcctcgattaaccacggtaattccggcggcgcgctggtcaactcgttaggcgaactgatggggatcaacaccctctcttttgataagagtaacgatggcgaaacgccggaaggccttggttttgcgattcccttccagctagccacgaaaattatggataagcttatccgcgacggtcgcgtgattcgcggctatatcggtattggcggacgagaaatcgcgccgctgcacgcgcagcagggtagcggcatggacccgattcagggcattgtcgttaatgaagtgacgccaaacggccccgccgcgcttgccggtattcaggttaatgatttgattatttcggtcaataataaacccgccgtgtccgcgctggagacgatggatcaggtggcggaaatccgcccgggctccgtcattccggtcgtggtaatgcgggatgataagcagctcacgttccaggtgacggtgcaggaatacccggcgtcgaactaaaacgacgcggcttttgcccgcgtcgttcgacgactagtcaataaagactggccctgccggaaaatgcgccaggaaactcgtgaagatcagcagagcggggagacttttctccccgacggcttcttcacgcagcgccttatccagtacaagcaggctatgctcccccccttcccccaaaatgccgcccatccagagcagtcgttgcgcctgttgacgcgcatactgcgatgcgcttttccaggcgaccagatgcagcaacgtttgtaacagcaggacccgagacgcgtgaccatcgcgttgcaatcgcctgaatacgggtaatgcaatactacgtaccgtcgagaaaccgctcgccgcctccccctcaatcggcgataaaccaacagccgcctgtttgacgaaatcgcataactgattgtgtgttaatggccgctcgcctgcgctcatataccctgcggcaaaacagagtaacccgataccctgagcccaatcggttgatggcagaatcccctgcggaacattcggtgccgacgtctgtgcggcacaaagcccctcgtcgtaacactgtgcaaaacgttgctcatatattgctgagttgacgccagaccacggcagtaaatgcagcgctggctcaagctcagttatctgattcaccgtctcaacaacataatgcaagatggtttctctggatggcatggatgtaccttgccgaaacgcaaccatttcactcattactgtgtcctcattttgcgggaacagaatcactgctcccgattagattggattacatcgccagcacgtacttgagcatcacgcccgccgcaatggccgagccaatcaccccggccacgttcggccccatcgcgtgcatcagcaggaagttctgcgcgtctgattccaggcccactttgttcgatacgcgtgccgccatcggcaccgccgacacccccgccgaaccgataagcgggttgattttgttcttactgcacaggttcagcagcttcgccatcagcaccccggccgccgtcccaatcccgaacgcaatcacacccagcagcagaatgcccagcgtctgcggctgcaggaacttgtccgcgaccagcttcgcgcccaccgacagcccgaggaagatggtgacgatattaatcagcccgttctgtaccgtgtcgctcagacgctccaccacgccgctttcacgcatcagattgccaaagcagaacatccccagcagcggcgcggcgtccggcagcagcagcgccaccagtagtaacagcaccaccgggaagaggattttttcccgcttactcaccgtgcgcagctgcaccatgcggattttgcgctctttctcgctggtcagcgcgcgcataatcggcggctggattaacggcaccagcgccatatacgagtacgccgccaccgcgatggcccccagcagctccggcgccagcttgcccgacagataaatcgccgtcgggccgtccgcgccgccgataatgccgatggccgccgcctgcggcagggtgaagctgataaggccgaagtagttcagcgtcaacgcccccagcacggtggcgaagatgccgaactgcgccgccgcccccaacagcagggtgcgcggattggccagcagcgggccgaagtcggtcatcgcgccgacgcccataaagatgaccagcggcgcgacgccggagccaatcgccactttatagaacagcgccagcacccccggcgtgtagcccatgtccaccgccaggttctccatctggctctgcaccgacggcagcgccagcgctaatgcttccttaatggcatgcacgtccggcgcgcagtggagcttcgcggcaatcaccgccagctgtccggcgtcgtggtgcgccagcaggctttccagcgcggtcagcgccagcccggcctccggaatgttcgacagcagcccgccgaagcctatcggcagcagcagtaacggctcgaacttcttcgcaatcgccagccacagcagcagcaggctgaccagcagcatgatggcctggcctgcgccaaggtgcatcagccccatgccctgaagcagggcgttcagactttccatttccgctcctcgtccttacgccagcgtcatcagggtgtcgccgacggagaccgcatcgccggacttcaccgcgataccgcgtaccgtcccggcctgcgcggcgcgaatttcggtttccatcttcatggcttccagaatcagcagcacatcgccttcggccaccgtctggccctcggtggcaatcaccttccagatgttgcccgccagcggcgcggtgaccggggtgccggcgcctgcgggagcggcagcctgaaccggtgcggaagaggctgccggaacagccgcagtaagctggctgatatcgccgccgtcgctgaccttcaccacaaaggctttgccttccacttccacggtgtagataccggaagctgcaggcttctctgcttttgccaccggctgcgcggcttccgcctgcggcagtggctcaaacgccgccgggttgtggcggttctcaaggaatttgaggccaatctgcgggaacagcgccacggtgagcacgtcgtcaatggcgtttcccgccagagtaatgcccttctcctgcgcctgacgcctgacgtccgcttccagttcagccagctccggtttgagtaaatccgccgggcggcaggtcaccggagcgcccccttccagcacgcgggcctgtaacgcggcgttcaccggcaccggcgtgtggccgtattcgcctttcagaatgccggccgtttctttggcaatggtcttgtagcgttcgcccgtcagcacgttgagcaccgcctgggtgccgacaatctgcgaggtgggggtcaccagcgggataaagccgaggtcctcgcgcacgcgggggatttccgccagcacctggtccagtttgtccgccgcgttctgctgcttcagctggccttccaggttagtgagcattccgcccggcacctgggccaccagaatgcggctgtcgtagcccttcagctggccttcaaaggcgtgatactttttgcgcacctcgcggaagtacgcggcgatattttccagcttcaggatatccagcccggtgtcgtgttccgtgccggcaagcgttgccaccagcgcttcggtggccgggtggccgtaggtggcgctcatggacgaaatcgccgtgtccacgccgtcgacgcccgcctcgatagccttcagcagggccatctccgccatcccggtggtggcgtgacagtgcaggtgcaggcgcacctcaaaacgttttttgatttcgctgaccagctcatacgccgccatcggtgtaagaatgccggacatatccttgatggcaatcgagtcaacgccggtctctaacaactgttcggttaaatccagccaggtctgcagggtgtgcgccgggctggtggtgtaggagagtgtgccctgggcgtgcgcgccgtggctgcgtactgcctgcagggcggctttcatattgcgcgggtcgttcatggcatcgaagacgcggaacacgtccatgccgtttttcactgcccgctcaacgaagcgttccaccacgtcatcggcgtagtggcggtagccgagcaggttctggccgcgcagcagcatctgcagcggggttttgggcatggcttttttgagctcgcgcaggcgcagccacgggtcttcgccgagaaaacgaatacaggcgtcaaaggtggcgccgccccagcactccagcgacccgtagcccacgtcatcgagcgcggcggcaatcggcagcatatcgtcaaggcgcaggcgggtggcgaacagagactggtgagcgtcacgcaggacgacatcggtaatggcaatggtcatggatccctccgggaattaagcattaaggcggtgatggtggtggatagcggcggcaatgaccggctttaagcgggtgaagtcgtccacgacgggcgcggcggcggcaggtgccgccttcggcgccggagccggttcagggaagaagcggttgacggcggcggacatgccgcggatggcgaaaatcagcaggaacagaaacgccagcacgaaccccatgccgaggaacatcagggtgaagccttcacctaatagcagagctgcattagtcataaaatagccttcaggcaggaggcacgataatggggctatttatgacgatgaaataataagggtggatttccctgagccgccccggccagagcccttggttattattatcgtcataacgtattaccaccattatcgtgcaatttacgtaatcaggtttatttgatgaaacttacgttctggcatatttcatcagcgacgatctctttacgctgattaaaaataattttgttctgttcaaacagattattcccatgggtatcaatagaaacaatcagcgggccaaactctttaacccgacagacccacagcgtttccggcatccccagatcgcgccattgggcatcttcaatttcttccacgcacacggcggctacaaccgcacaaccggcagggaatacgcagtgcagcgctttgtgttcagcacagccctcttcggtacctttacccataccgcctttacccacaattaatttcacgccagtctgcgcaataaactctttttcgaatttctccatacgcatgctggtggttgggccaacggagaccatttcaaacttatcgtcttcgcctttaattgggcggacaatggggccagcgtgtaaaatagcgccgccgcgaacatctaccggaagttcgcgaccaccttcaattaaacggcgatgggctacgtcacggcaggtaacaatatgaccgttgagataaataatatcgccagccttaatatccgctaaatcttcatctttaattggcgtagtcaggatttttttagtcatcagaaattcactccgctgtgagacgtaatggtgtaattcaaatctttatcgaaaacgatatgccctttacggtgcgaccagcagccgacgtttaccgccacgccgatggtagaaggatgacgcgcggtgttttcaatgttcacgcccataacggaggtattaccggacatcccctgcggccccaggccaattttgttaatgccgtcttccagcattttttccagcgaggctgcacgctcattctcgttatgcgaaccgatcggacgcatcagcgcttttttcgatagcagtgccgccgtttcaacagaggtcgctacgcccacgccaaccagcagcggcggacaagcgttgaggccgtagctggtcatcacatccagtacaaagcgggtcacaccttcatagcctgcacccggcatcagcaccatcgctttccccggcagagaacaaccaccgcccgccatataggtataaatgctgcactgatcggaattgggaacgatttcccagaagaccgtcggcgtacctttacccacgtttttaccggtgttgtattcatcaaaagtttctacgctgttgtggcgcagcggagaatctacagttgctttgatcaccgcctcacgcaacaacgcttccagctcgccaatcagcggaaagttcgtcccgcactccaccagaaactgaatgacaccggtgtcctggcaggaaggtcgatccagctctttcgccagacgctggttctcaatcatggtagtaaagatgacgtcggccagtttactggtctctttcttatgcaaatcttccagttttgcagtgacatcatcaggcaaaactttgccggtatatcccacaaacttggccataacgtcggtcatatgggatatctgttcacttttgctcataaatgctccttagtcagaacagcttccgttaattacggatgaaaagggaaaaggattggcagcaggatcaagctgacaatggttgaaacgataatcagggggataccggccttagcgtagtcgacaaatttatagccacccgcggagagcaccatcatgttggcaggcataccgataggggttgcgtaggcgcaggaaccgccaatgaccgtcgccatcagaaccgcacgcgggtcggcccccatgcctgcggcaatggacaaactcaccggcaccaatagcgctgtcgttgcggtattggacataaagttggtcatcacaacggataaggcgaaaacggcgatcagcaacatgaacggtgaggagttttgccccagcatgccgattacatagtccgcaaccagcttgcctgccccggtcatttccagcgcttttgccagcgccagggtgccgccaaagataaaaatagtctgtgaatcaatagctttataggcctgtttttccgtgagtacgccgcttactaccagcacaagagcgccaatacaaccggtcacggccaggctgacaccgatcttcttctcaaagatcatgccgaggatcgttgcgatcaacaccacgagtgagagccgttgtttccactgtggaacatggctgtagtcacgttgcaccccgacgctccccacctcaccgccggtcgcattattcggcagaaagcgatagccaatagtcaggaagtagagaatgccgcagatgagcatcgggagaccgatttttgcgtattcaaaaaagccaaagccgccgccaatattctgtagcgcagactgcgcgataagatttcccggcgcgccaattaacgacaggttaccgcccaacgcagcggcaaaaaccagcggcatcagtagacgagaacgcgagaagcccgattttgccgccacgccgatcaccaccggaatcaaaaccgcagcggtaccggtgttagagaggacgccagacatcaaacccaccaccaccataatggtgaagatcagctgtttttctgttttcgcgaagcgcgtgatgacgccgcccactttgtttgccataccggtctcgaacaacgcaccgcccacgataaacatcgcgacaaagaggatgacgttagtgtcgataaagccagcaaaggcctgtttgatattcagaacgccggtgataactaaggccacgcagacaatcatggaagtgacggccagtggcactttttcccatacaaacatgacgatagcgaacaccaataaacataaggtaagggtaatgggttccatatttataattatccaatcaatgatatatgatattgtatccaatgttgacagggagaaattattcccatacaaaaactaagtcaaatcgtttctcaggaaagatgcaggagtgggatctacatcaagatcgtggttagatcgttactggacgtgattaatagaattgaagaattggttgaagcgcctgcgatgctcacgcaggcgaaaagatcaggcagaagggtcaccaacatagcgggtcagcatattctccattgagcgaataatgtgttcgcgcatgcgctggcgtgccaatgtttcatcatgaagttcaagagcttgcagaatacttttatgttcctgaatggaaatcacggcatactcttcttcggtgaccttatggcccatcgacaggccgttccacatattacagagcaacattttcattttttcgttgccagcaacattccatatttccatatgaaatgcctgattcaggtcggagtattccgccgagttattttccgcgagagccttttcagcggcataatgcacctgggctatccgcgagatatcggagccaggacgagaagctttagccaccgcctcactttctaacagcgcgcgaatttcatagtgttcacggatcgtttgttcattgatgcccaacaccaccgcccctttattagggcgcacttttatcagcccatccgccgccagaatctgaaacgcctcgcgcactggcatactggacacgccgaccattccggcaatgccttctaacgtaatctcctgcccttccactaactccctcgaaagaatcgctttacgcagcactgccgcgacctgttctttcgctgaaagaagcttaatcttccctaacttaggcttctgcactttcccaatccttcatatgttgacgcattatttctgctaaagagaggaaataacgctgcataacttgcccaatctcatcacgccgcccctggcgtatgacgtcagccagttcagcgaaaagctgcgccgactcctgattatcttttttcagatgcaaaataacataagagacataaccgtccaggaactgctgatacaccttttccagatagcggttattcacataagaaatcagcatcgcatgacactccagttcgcaggatttgtcttctgcgacagccagcgcttgcgcacgtatcaggagggcatcgcctacttcgctgggtatcagcgaaaacatttcggcggccatcgcggcaatcacgcgaaaaatatgactcacgcgatcggcctcaagatgcgcgacctgcatgtgcctgttgggcagtcggattaaaaaaccttcctgttcgagtgactgtagcgcttctcgaaccggcattcgtgaaagaccgagctgctccgcaatactttcctgcgcgagttcttctcccgcttttatattgccggaaagaatttcatagcgaagcatttgcgtaatgtgatcgcgggtttgcgttctttggatctttttcacgacgttctcgttaataaccgataagacgtgaggagtttagcagatttagtgcttgatttcgtggcttgtttacagtcaaagaagccggagcaaaagccccggcatcgggcaggaacagcttatttattaataaaatcttcacccaactgaatatcttttttcagcgtatccagcatagcgtccagcgaatgttgctcgaaagcgctcagtgtgccgatggatttacgctcttctacgccgtttttacccagcagcagcggctgagagaagaaacgggcatactgaccgtcgccttccacataggcgcattccaccacgcccttctcgccctgcagagcgcgaaccagagaaagaccgaaacgcgcggcagcctggcccatagagagggttgccgatccgccgccggctttcgcctcgacgacttcagtaccggcgttctgaatacgtttagtcagctcggccgcttcttgttcggtaaaacttacgcctggaatctgcgacagcagcggcagaatcgtcacgccggagtgcccgccaatcaccggcacttcaacttccgttggcagcttacctttcagctctgcaacaaaggtattagagcggatgatatccagcgtggtaacgccaaacagtttgtttttgtcgtatacgcctgcttttttcagcacttccgccgcaatcgcaacggtggtgttcaccgggttggtgataatgcccacgcacgctttcgggcaggttttagcgatctgctgcaccaggtttttcacgatgccggcgttaacgttaaacaggtcggaacggtccatacccggcttacgcgccacacccgcagaaatcagtactacgtcagcgccttcaagcgccggggttgcgtcttcaccggagaaacctttgatttttacagcggtggggatgtggctcaaatcaacggccacaccgggagtcactggagcgatgtcgtacagggagagttctgaacctgaaggcagttggttttttaaaagtaatgccagcgcctgaccgataccaccagcagcgccgaggactgcgactttcatcctaaactccttattatatgattagctaagtgtctattgctccgcggcggcgaccttaattcacaaattcaatgattacaatcctcactcatcaagaatgcggagtcgcgcaattttggcttttatgcatttaatttgcgtaatccggatcggctgcaaccagagagcaacgttctacaggtggtgacaatataccctactaccctctcaaaacaacatcattttgataacaattaatttacttttaatcttatttgcgaggcgtgacacaggcatgtttcttgataacgaaatttgataaaattccgctctttcataacattatttcagccttaaacaaggcagactgtttgcataaaaattcatctgtatgcacaataatgttgtttctaccgccatattacgggtgacttatgcgaagctcggctaaacaagaagaactagtaagagcgtttaaagcgctcctcaaagaagaaaaattcagctcacagggcgaaatcgtcctcgcgttgcaggatcagggctttgaaaatatcaatcagtccaaggtctcgcgcatgttgactaaattcggcgcagtgcgtacacgtaacgcaaaaatggaaatggtgtactgtcttccggctgaactgggcgtcccaacaacatccagtccgttgaaaaatctggtgctggatatcgactataacgacgctgtcgtggtgattcataccagccccggcgcggcacaactcattgcacgcctgctggattcactggggaaagcagaaggtattctcggcacgattgccggcgacgatactatcttcactacgcctgccagcggcttttccgtaagagatctgtacgaagccattctggaactttttgaacaagagctttagtcccacttcctccgtcgtcgtacggcggaggcacctttttgtcctctcccctcgccgctttcctgtacgcctatcatttggcaaatcatgcccttaaacattcaccacatgaatgataaatcaaaaaaacgcacaaaatgtcaaatttattaagcaattgattttcttttattttttaaacgacagcggcgaaaaacagcaattttaattccataacgttataaaaaataaaatttttaatgtttttaaaaagcagaaacaattagcgtagtattaattaatcgcgtgattagtgtatacttaattttgtgatgagggtcacgaaacaaagtccccagtaaaggaattcgacgaggtaaaaatcatgaaaatcaaaaccactgttgcaacattaagtattctgtccgttctctcttttggcgctttcgccgcagaacctatcagcgcagagcaagcgcaaaaccgtgaagcaatcggatcggtttcagtcagcgctatcggctcatcgcctatggatatgaacgccatgctgagcaaaaaagcggatgaacaaggcgctacggcctaccacattaccgaagcgcgtagcggcagcaactggcacgccactgccgaactgtacaaataaaattcacctgccatcgcatataacgtgtccttgcttcgcggagatatcgcataagaaaagcccattaatccgcgaggttgaccctataaaggaataaaagatcatgaaaacgaaatacattatcgcatcactcggcctggccactctgctctctttcggcgcaaatgccgcagtacatcaggtcaacgcggaacaggcgcagaatctgcaaccgatgggcaccatttccgtctcgcagattggtagtacgccaatggatatgcgccaggagatcgtcgctaaagctgaaaaagcaggcgctaatagctatcgcatcatcgaattaaaagaaggtgataactggcacgccaccgccgagttgtataagtaaaccctcgtcgtctaacccgacgacttgcccccgcctgccgggggcttttttatgctttttcaatgccggacattaaaccgtagccgcccctccagctcttcttccgcttcatcaaagagtaaaatcagcgccccgtagcgcctgcgcagtttatcaggcaggtgaacgaactcaatctctagcggtaggggtaagatatcgctcattaccgcatcccataatgtatcaagatcgcttactttctcactggcaagaccaaacgtctgcgtaaactcgcgataaaaatcgctttggtttttaatatcattaaaatcaaaagtatagacattcatagccagccaccatccccgacagacaattgtctgttttactactaagcatcattatgcagaggtttcacttccagaaacgcttttagccccggagcactcttgcgctgtttttgtatctcaaataagtatagtcataaaaaaaccgacgcttttggcatcggttcttgtgggttagctatcggtaagcgcgttctggtatttatgtaacatacccgtcaggcgtttaaccggttccgtcacctgcggcggcgcctcccagatacgtaatttctcctgatagatatccagctcatccagcaactgaccaaagtagcgtcgccgtttatcatcgcttccggcggaaataacatggtctgcggtacgacgaagctgacggtggaacactgacagatcttcattaaccggtatcggcgcgtcgcgcagacgttgatgagcaatgatcatcgttagcgccaggcggaacttcggcaaatcgccaggaaatttattcatcagcaaaaagagttgctgatataacgcaggcagacggttttctttacggcgtaccacgttggtcgtcattgccgagaccgcagcggaaacaaactgattaagcagcacgcgaccggttcgatctttggatttatcacgcaccagcaggatgacgataaacgccagcatacagccgacaatttgccccaacgcgctgtcgaggaactggctgaaatggaacgtcatcggattatccaacacaataatgttaatcgtactggccagcgcccccatcgaccccagacgccgtttctggacctcaatgccgataaagaaccccaataccgccaggctcaaacataacaacagcatactttgctgcgtattgggaataatcaccaggaaatagagcaatcccagcggcaacgccgccagagtgccataaataaaatcgatgcagaccatgcgcggattgggtaaacgcatcgccagcgaggtcaccacggcaatcatcaccatcgcgccattacccgatgtccagccggtccatagccagaataatgtccccagaatgcaggaaagcgtggtgcgccagaagttcaccatcgcatggtgacgttcagcggattccactttaactacgggctcgccttgcaggatctcttcttccgtcgcgctgattttggtgttactgatcacgccgcgtttaagcaatagatagcgcgtcgcagcgcctacccagctataaagcgtgacgggcgtttcgcgctcgccagtccagacaatgacacgccgcatccgttttaactgtctgtggacgtcctgtaccgtttcaaccggcgtctcgaacagttcccggaatgtatcggtaatcagttccggccgcgtgttttgaataagataagtttcacaggattgcgtaatcagcgtgagcgaaagcgtattcaacgctttcaggcggcggttagcgcgtacccagcgcgaagattccatattcagattacttcgcatcccctccagcgccgccgtgcgtcgcaccagatcgccccaggcgttgtcgacttcttcgctgtcgccatgcttaatacaaagctgcattagctgatattgcgctaccagtaaactgtccagttcgcgatcaacctcctgctttatcgatcgcggcgagaaaagcagatccgctaaaatagcgcagccaatgccgataacgatttcgctacagcgctcaagcgcaaattgcggcgtgagcagcggctccgtctgaatggtaatcacaatgatcagcgcagtataacctgacagtccccacgcataagagttttcgatccgtactaaagaggagatccaggtacaaaaaccggcccagacacagcacaccagaatcatcaataacggcgcgcggatcatagagataataatgataagcgcggcgatacagccaataaacgtcccgataatacgcaacattccgcgataacggatagcgccggaatagggttctccgccggcggcaaatgccgggcctgccgccacgatcgcggcggtcagcaccgcccaacgcggcgtctccagttgaaaatggaagccgataaataatgccagcacaatggcgcacgccagctttaccgcaaaacgaatgtgctggttggcaatggagaaaatgcccatgacgattaaccgaattcgcgcagccggtgcgccagtttacggaagaaggagtcctggcttgcgtcacgatcctgcttaccggtgatcacgacggttgccgtcgtaccggcaggccacaaattcccctgctgctcgtcgagccggatgcgcaccggaacacgctgggccagacgcacccattcgaggttagagtctatcgtcgccatccctttcgcatcgctggtactgctggcattcgttacccctgccgccacgctatcgacggtaccttttaatacccggttgctgccaagcggcgtgatttcggcacgatatcccggacgcacgccttccagcttggtctcttccatataggcctgcacgtaaaaagagttctttttcaccagggcgacggccgtggaaccgcgggtaataaattcaccggcataaacattgaggttagtcacccagccgtcagcaggcgcgcgaataacggtgcgctccagatcgagtttagccaggtcgcgcgtcgcctgggctttagccagttgatgcagtaccgtctgcaagacgttgttcgcctgatcgatctcttcccgggacatcgcctgtacgccgaggcgattacggcgaccggcttcctggcgtttttcctgcgccagtacctgataataggctacatcagcttccgcttccgccagcgctttttgatagcgtggctgatcgatggtaaacaggacctgatcctttttcaccagttggttatcatgcacgtttacatgggtaatcaggcccgcgacatccggggcaatagcgacgacatcggcgctaaaacgcgcgtcgcgcgtccagggagattcggtgtaatacacccaggcgcggaaaatggcgataaaggccagaataaccagtacgagggtaatggccgtacgggagagttttcttgttagtgttttcacttcaacctcaaacgaacaggcgcgatattaaataaaacagacaacaatacagcgcggtattgaacagagccggatgccagacaaaatcatagatgcccgtcggcacaagcatccgacgcaccagccaaaaaatagccagtgacaaaagcaattcgaaaaatatcggtgggaaggaaagaccaaacaccacgataacgggaaacagactcatgttgaccttgatttctgagagagagcaggcgatagattgttaagctacatcgccgcagagaagggcaagagacgccaggcgagagcgacatagctcttattcgaataatagtatattaacgtaattgttatgctgttatctatattatgtgatctaaatcacttttaagccagagtgaataatggaacgattaaaacgaatgtcggtattcgccaaagttgtcgagtttggctcttttaccgccgcagccagacagctgcaaatgagcgtatcgtccatcagccagactgtggcgaaactggaagatgagcttcaggttaaattgctcaaccgcagcacacgcagcattgggctcaccgaagctggaaaaatctattatcagggctgtcgtcgtatgctgcatgaagtgcaggatgttcacgagcagctttacgcttttaataacacgcctatcggtacattgcgtatcggctgttcttcaaccatggcgcaaaatgtgctggccgggcttaccgcaaaattattaaaagagtatcccggtctggcggtcaatctggtgacaggaattccggccccggatttaattgccgacgggctggacgtggtgatccgcgtgggcgcgctgcaagactccagcctgttttcccgtcgactcggcgcgatgccgatggttgtgtgcgccgccaagccgtacctcgctcagtacggcgtcccggaaaaacccgccgatctcagtagccattcctggctggaatatagcgtgcgcccggataatgagtttgaacttatcgcgccggaaggaatttctacccgactgattccacaggggcggttcgtcactaacgatccgatgacgctggtacgctggctgaccgccggaaccggaatcgcttatgtgccgctgatgtgggtgatcgatgagatcaatcgtggcgatctggagatcctgctgcctcgctatcagtccgatccccgtccggtgtacgcgctgtacaccgaaaaagataagctgccgcttaaagtgcaggtagtgattaacgcgttaactgactattttgtcgatgtcgcacacctgtttcagggaatgcacgggcgagggaaagaaaaataaaaacaccgggtaattgctgaagacgattgtaggtcagatgccacccgacgcagacattgcctgatggcgctgcgcttatcaggcctgggcggcacacaccacaggcctgataaggcggacagttatgcggtgccgccaaccgtcaggttatcgactttcagcgtcggctggcctacgcctaccggcagactttgaccctctttaccgcagacccccaccccgttatccagcttaaggtcgttgccgaccatggagatctgttgcatcgtttcaatgcctgatccaatcaacgtcgcgcccttcaccggcgtcgtgactttgccgttttcaatcagatacgcttccgaggtagagaacacaaacttgccggaggtgatatccacctgaccgccgccaaagttaggcgcatagatgccgtattcaacggattcgataatttcctgcggcgttgactgccccgccaacatataggtattcgtcatacgcggcatcggcagatgcgcataagattcgcgacgcccgttaccggtcggcgcagcgcccatcaggcgcgcgttcagcttgtcctgcatgtatcctttcagtacgccattttcaatcaatacgttgtactggcctggcgtaccttcatcatcgatagcaacggagccgcgacggttcatcattgtgccgtcatccactacggtgcaaagcgcggaggcaacctgctcgccgatctgaccgctaaatacagacgtcccacgacggttaaaatcaccttccagcccgtgcccgaccgcttcgtgcagcaatacgcccggccacccggcgcccagaaccaccggtaacgtccccgctggcgcagcgaccgcggagagattaaccagcgccatgcgtaccgcttctttcgcccacgcgtcagcgcgaacctcgccgtcgagatcggcaagaaaatactcataaccaaagcgaccgccgccgccgctggcgccgcgctcgcgtttaccgtcttcttccacctgcacgctaacggacaaacgcaccagtggacggacatccgccgccagcgtcccgtcggtcgccgccacgaggattaattcatatacgccggtcaggctggcgttaacttcctgcacgcgtttatcggcttctcgcgccgctttatcaacgcgtctgaggatatccagcttctcttcgcggctcatactttgcagcggatcaagggtggtgtagagcggctgatgcgctacggcggcgagcgtttttaccttgccttcgccgttctcgcgtacaatggttcgcgctgcctgcgcactctgctccagcgccaggaggcttatctgatcagcataagcaaaaccggttttttcgccgctaatggcgcgaacgccaacgccctggtcgatattatatgaaccatctttaatgatgcggtcttctaaaacccaggattcgtgatagctcgactgaaaatagaggtcgccataatcaagacggcgttcggccagttggcccaaaatagcgaacagatcctgatggttcaggccattcgccgctagcaattgttcacttaccaggttcagactcatcgtttttgctactcattgatttctgccggatggcggttcacgccttatccggactacgttgttagattgtgcaaaccggataaacgcagcgccgtccggcatgactatttactgagagtggggcaattcctcgcccccgtcaaatcattgctggctttcttttctcggttggcgcagaacttcgttgatctgcggcgcatcgaccggaccggtaatgcgataacgcagaatggagaccttgctccatagcggccccaacactttactggcggcaaataccgccgcgccgacaatcgggttaacggcaaacgcggcggcgacgcccacggtggcggaaatttccggcgcgacaacggcctccatatcaagacgacgacgcaccagatcaacagaacctttcattgcaatatccgcttccagcccatccaccagcgtatcgtcagtatgtaggacgccatctttaatccacgcggtactatgaatagagtcgaaatagaagccctcgctaaaggtatctctgaagtcaaaccgcagcttacgcagcaacgcatcaaaactgagcagccgcagtagctgtccggcatgaccgctactgagatcagtaaactcgcctttacccagacgcgtgcgtaaaatcccgttgagcgtggcttcatcaggttgccagggcgggtttcgccagtgcagatcgtaatctacgttaaaagacgcgttctggattggcgtcgagataccgaagaacccggcagccgtgtcgaggttactaccatgcagactacctttcagcgaggttcgttcattacccggcgcattcacccactcgccgttcgctttcaaacgggcgagtccggtatcgatcaggccattcgccagagtcagcgtattgcctttgatggcgaaatcgccatcaatacgcccatatttttgcccccatagccagcactcttcgcagcgaagctgtaagtccggccagccacggaagctaatcgtgttcgccgaagccaacggcgatgtcggcgttggtgacgaggcgtgcgtttttgcgacgccagggttgtagtacaggtacttaatgttcgccagccacggcgcatggttgcgcatgagcagcgtggcgttcacctcacggccctgcgcttcaatttttgttccgttcagcgagggggctgaaacgacgctcaaattgttccactgctgaccgcccagcgatagcgcgggagtacgcaacgtgacgcgttgaggaaactcggccgaactgctcacgttatccgccgcgcctttctggaataacgccagccattgcgcgccatccagcgccggcagattgagctcaacgccttgttgagcaggtaatggcggaatcgtccggctgtccgtcgtccagatagcccgatccaacgtcagcttctgatttaataaccagcggctgttaaagtgatttttactccctgcgctccccgttagcgcaaaacttttcaggttgccgtcagcctgaatgttcaccggaatggcttcgcctgcgggtttatttagcggagaaggtaagtgactgctcacatttctcagatcgccattcagctcgatgtgataagtggtgtcagcgtgatacggaagatcgatgccgactttaccattccacgtcacgctgccgctcagggcgtcattcagttgcggcggtaagacgcccatacgcgttggctgccagttaccgttcaggttgacggcgacctgataggcttttgccccttccgtcgtactgaaatccaggttcagcggctgattaaaccagtttgccgtcagcggcccgctttttagcgcgccattcacaaagctgaatttaccgttcagatttttgagcgtgctgtttagcggcttaataaacagactgttattacgcaacgagacatcaccctcagcggtaacctgttcgccatccagcggaatatcaagatgtaagcgagcattcacatcgccatctaactggagctccgccagcgtcgagccaagcgagtcttttagtggcgtctcgtcgaaataaggcccaacggcttttcccggcccgttaatatcggcatcaatgagcagtttctctttggaataatccggaatcgccgccgcgagtttgctggccttcaccccgcccaaatcgacgctatccgaacgcatccacaggccgtcgttcaggaaatccagttcaatgttgagattttttagcgccggccagtcgggttgaaaggcaaacgtcgcattgcgtagcggcaccagcacttcaaactgaccttcgttatgcttatagggaaagaggtgcgggttaccaccgtaaaccaacgtggcgttatccgcctcgccgccctgaattgcgccgctaaggtaatcgaccagcgctttgcccatcaggttttccggaaaatagcgccacgcctgagatccatcgtcggtactgattccggccagaatacccagccacggttcgtcgcccgtcggttgcagatagcggaacccgccgcgcgcgtgtaccgcctttgctttgacgtcaatgtcgcggccatcaagctgaaagccgttctcattcttcaaccaactaagcgtcgcgacgccgttttcaatttccagcggcgcgcgaaaaacggtttcatagggcatcttagcctgctgcatcgcaaccttcatctgcccgtcttctacgcttcccgccagcgtaccggaaaaatgttccgcgccgggcaacagcttccactgtttccaggcaagattttcccacgatgcctgaaaacgcgttttttcggtggcctgtagcggaatatccagcgccagtgtggcgatctttccgctcggctgcgtagcctgccatatttcgcccagcacaggcgacagtttagccgccagcggacgtaatgcttccagccccgccagttcaagattactggcgcgaatgcgtagctcatcgctacgtgtgtgattctcgccgccgacgtcctgctgcgggagccaggccacggttaaggctccgctcggccagggtttaccatcaagcgtaatccgtgtgtccggaatataaaactgccagcccggctgctcacggctaatctgcgccgtcaggttatcgacagacaacgtgtgcgtcgtgttatcgcccaaccagcttgcgccgccctgtttcagccagacgtctcctccggcgatttcacctttactgagcgtcatccagccttccagactgaaacgcgccgtctggagcgccacattatcctgcatccatttgcccagccacggcttgacgtcaatatcgtcggcctgtaaccagactctgccgttatttagcaaaccgtcgtcatcgcgtaaatccatccgcacctgcatcacgccgtgctgcccggtcaggctggagagactgacctcgccttcggcgcggtgccgctctttgccgtttagccaggtaagctgtgggatcgccagctccgcgcgttgtccggaaagcgtcagaaaactgatttggctatcgcgcagatcgaaatgatcgaactgccgcaggaaaagatcgcttaaacggctggtttcgatgccttcgccgtcgctgctttgaagaggcgtgttggtgcggaaattgagttgccagaaggtcaggtcgcgaaactgccagcgcatatgcaacaggctttgccagacgtccagcgccagcgtaacgcgttttatcgacagttcgccgccatctttcagggcggcatgaatattatgcgcttccagcgtagggccaaaattttgccagcttgcggagagttggctggcggccaccggcacgccggtcacagactcaattttattcaggatagccggacgccaggcgtcaagatgaggcaacgccaggcgcagcccgctaaccagcagcgctgcaatgacgatgagcgcggctccagtgagcaataaaatccccggcaatcgcctcacgcgtctctccttgtctgccaaaaaatacgactcacaaccttgctttgccggacggcggcgtgaacgccttatccggcctgcaaatactcgtacgggtcgcggtcttttacatcattacgacgtcaaactgctcctggttataaagcggttcgacctgaactttaacctgtttgccgacaaagatttcgacttccgccagcgcgtgtgattcttcgcctttcagcgcttccgccaccgcaggagaagcataaaccaggaagcgatcggagtcataagcgtgatgaacacgtacaatttcacgcatgatctcatagcagacggtttccaccgtttttaccgtcccgcggccatgacaggttggacattcgttacaaagcacatgttccacgctttcacgagtccgtttacgggtcatttccaccagccccagcggcgaaaaaccgttaatactggttttcacgcgatccttacttaacgcctgttccagcgaatgcagcacccggcggcgatgatcttcattattcatatcgataaaatcgataatgataatgccgcccagattacgcaggcgtagctggcgggcaatggcctgagtcgcttcaatattggtattaaaaatggtgtcgtcgagattacggtgtccgacaaacgcgccggtattgatatctaccgtcgtcatcgcttcggtttggtcgataatcagataaccgccagacttgagttcaaccttacgctccagcgcgcgctggatctcattttccacgtcataaagatcgaagatcggctgatggccactgtaatgctccagcttactggtcatttccgggatgtattctgcggtaaactccagcagcgactcataggtcagacgtgagtcgacgcgaattcggtccaactgcgcatcggcgaaatcgcgcagcacgcgctgcgccagcgccagttcgccatacatctggtagcgcgtttgcggacgctttttgcgctccattactttcgtccagacgcgcttgagataggcggcgtcagacgcgagatcctcttcacacacgccttccgctgcggtacgaataataaacccgccctgttcgtcgcagtattccgccaccacctttttcaggcgctcgcgttcactttcgctttcgatgcgctgggaaacgccaacgtgtgacgcgccgggcataaaaacaaggtaacgggagggcaacgtgatgtccgtggtcaaacgcgcgcctttcgtgccgagcggatctttcactacctgcaccatcagatcctgtccctgacgcaccagttcggagatatcgcgcacggtaaactgtttttgctcgtcgcccgccacgcattcggtatgcggcataatgtcggaagcgtgaagaaatgcggctttatccagcccaatatctacaaaagccgcctgcatacctggaagtacacgacttacacgacctttgtagatattgcctacgattccgcgtcgcgcttcgcgctcaatatggatttcctgaagaataccgccatcaatgtacgccacgcgcgtttccgatggcgttacgtttaccaacaattcagccgtcatgtttatcccttttatcacgcagtgcgttaaaatgactcaacaactcatacgtttcaaccagcggtaagccgaccacggcgtgatagctgccatttatcttcctgacaaaacagccaccccgcccctgaataccgtatgcacctgctttatctaaaggctcgccgctggcgacatagccagtaatatcctgcgcagaaagcgtgcggaaagtcacctccgttaccaccagacaatccagcgtctgctgcgagtccgcaagcgcaacagcagtcatcacctgatgcgtatttccggaaagcaaacgcagcatttctgcggcatgagcggcgtcgcgcggcttttccagcacctcgccgtttaacacgactatcgtatccgcgcccaacaccggcagatcacggggaaccagcgccacgccagcctgcgccttttcgcgcgccagccgaacaacatactgctgcgcgctttcctgagcacgccgttgctcttcaataccaggcacgacctgctcgaatgaaaatccaagttgagtcaataattcctggcgacgcggggaaccggaagcaagatacagagttgtcatatcgacctttattgcacagcaaactgctggcgtactttacgcatcagcaaaaagagccagggccacagcacgccattgactacactactccagaacacttccggtctgaaagagacgttgatcactaaaaactcggcccagaaaacaataatgtccacggccagtgaaagcaacattaccaccagcgcctgctgccagagcgccaggttacggaagagctggaatttcagagcgaccagataggcgacaatactcatcgacagagcgcgcacgccaagtgtggaaccgctgatgagatcaagtatggcacccatcacaaatcccgtccccacatttacgcggtgcggcagggccagaatccagtacagtaagatgagcaaaacccagtttggccggaaaacaatgatgtcgtccggccagggcatgatttgcagcaacagcgcaataagaaacgagagccagataacccagcgcccctggctacgatagctcgccaccattaccctcccggcgcacgcgcaggcggcgtggtcgcgcccgaaggcgatggttgcgttgataccggcgccgtctggcccgcagatggctgagtaatccccgtcgccgggtccggcactggcgccggcggccccatcgcatccggagaaggcaacacctgcggcatcatctgcatcaggcgctcattggcgacgcggtgaacctcttccggcgtcatcggattggcgccgttacgatcggctccccacaacagcagcagatagcgtaaacgctgcaaacccgcggttggacgtgcctgaatgacggtataggcgcgctgagtgtccagcttgacggaggagaccaccgccaccggatacccttccgggaaacgcccaccaagtccggacgttaccagcacatcgccaacgcgaatatcggtattggcgggcagatgttcaagctgaagatcgtcagtgcagccgttaccggcggcaatcacgcggatgtcattgcgcagtacctgaatcggcagcgcatgagtcgcatcgcaaatcagcagtacgcgactggtcagtttcgccacggcgacaacctgccctacgacgcctttgtcgctaatgaccggttgaccttcatatacgccattaacgctgcctttatcgataacgacctgatcgctgtaaggatcgttaaccgttgaaataacctgagtcaccattttctgctcgtcctgacgcagcggcgaccccagcagctcgcgcaaccgcgcgttctcctgtttgtactgccccagcatcagcaggtcgctgttttttagcagtaattcctggcgcagcgcccgattttccagctcaagctggtcgcgagaagccagcgtttgcgacacgctgtcgagcagttcacgagggccgtttgaaataaaatagaaaggactgacggcagtgtccatgtacgttcggatttgactgaacgtccccaggcggctgtcggcaatgataacgccgagcgccaccagcaccgccagaataaggcgaatctgtagcgacgggccacggctaaaaattggcttcataggctatgcgtattctcgcgtcggagaggcaggacaatccagggataatcctgcccgtatccaactactcttcgctgaacaggtcgccgccgtgcatatcgatcatttccagcgccttgccgccgccgcgcgccacacaggtcagcggatcttcagcaaccacgacaggaatgcccgtctcttccattaacagacggtcaaggttacgcagcagcgcgccgccgccggtgagcaccataccgcgctcggagatgtctgacgccagctccggcggacactgttccagcgccaccattaccgcgctgacgataccggtcaacggttcctgcaacgcttccagaatctcgtttgagttcagggtaaagccgcgtggaacgccttccgccaggttacggccacgcacttcgatctcgcggacttcgtcgcccggataagcggaaccgatttcgtgtttaatacgttctgcggtggcttcaccaatcagagaaccgtagttacgacgaacgtaattaatgatggcttcgtcgaaacggtcaccaccaatacggacagaagaagagtaaaccacgccgttcagggagatcacggcaacttcagtggtaccaccaccgatatccacaaccattgaaccggttgcttcagaaactggcagacctgcgccgatcgcggccgccatcggctcttcgatcaaaaagacttcacgggcgcctgcgccctgagcggattcacgaattgcgcggcgttctacctgcgtcgcgccgaccggcacgcataccagtacgcgcgggcttgggcgcataaagctgttgctgtgcacttgtttaataaagtgctggagcattttttcggtcacaaagaagtcagcgataacgccgtctttcatcggacggatcgcagcgatattgcccggcgtacggcccagcatctgcttcgcatcatgaccgactgcagccacgcttttcggcgaaccggcacgatcctgacgaatggccacaacggaaggctcattcaatacgatgccttgtccttttacataaatgagggtattcgcggtacccaggtcaatggacaggtcattggaaaacatgccacgaaattttttcaacatactaagggataatcctgaaagctggggcggaaaacaaaatccgcttactttaccaaccacacgcagcagcgacaaggcgcaaaaatcatctgctacggtgaaaattagtgcagttcgtttcctttgttacaaatctcggcctgagtccctcagggctgaaaaaatcagcagcaatcctcgccttcgtttgcaacctgtcaaaggtcattcacctgcatatttgctgcaacaatctggcgagcagacaagcacacccccatgaggcgcagcgcgcgttattctacgtgaaaacaaattaaacggcaggttaaaccgagtatctttgcgaatattttttcacgtttgtgtcaagtagttgggaggaggcaaaaaaatcaccctgcccgccagccacgccgcgttttgtcagcgtctgccactcgccgcgcgaacggacgcctgtcgcgtaaacctgcgtaggcgtgcccgcgcaggcctctaccagactttgaaccagaagctggttttccgttcgcttctcaatgtttctgaccagactcggatgcagcttgagtaattccacattgagcgctttaatccagctcgtgctaaccagcgtcaaacccgcctgtgtcaccgccacccgaacgccaagcgcattgactaagcgaaggatgggttgtaaccgactgatgtgttgacaaacatctgcctccgcaagttcaataattatgcgatttcgctgtgatttttcacactgcattaacgtatcgcgcaaccagcgctgaaaacgcggacgaatcagcgactcaaccgtcaactgcattgccagattttcatccggccagtagcccagcaacgtaatcaggcggctaatttgtaatctgtcatactcttccgataaaccaaattgcagcaccatcggcatatactccgccgagctcacctcttctttaccgtcatagatgcgacacatcaattcccgatgatgtacgcgaccttctcgcgtgaccgctggtttttgataaagtcgcggtccaccccggttcagcatctgctcaatcaatgtgcgccagcgcacattgccgcgccctttttccggcagagtgtcgtcgtagatagcccagctatttcccccctgcagggcggcattccgcgccgcggcttcagcatgttccatcacctgctcggtggactgtccgctgcgccaggcgcaaatgccgatatgtaccatatcgtcacgatcgagcattttgttagccggtagcgcatcgacagcttttaaaagttgtccggcaatactttccgcttctttcagcgttcgatgcggtagcagcacggcaaagtcgctgcggtgataacgcgccagcagcgagccagggtaacgcataataaatgtcgatagcagattgataagcataaacatctgctcttccgcctgattgcctcccaggctgtcgcgcagaagattgaagtctggcaagcggatcatcatcaccacgccatgcactcccactttttcctgatcttccagcagcgtcgccagttggttatcaaagaacagacggttaccgagtccggttttggtgtcctgcgcggcgtaggagcgaatgagggtgtccaggcggctacgctgttcgtgagcaaactgaatttcggaaagcaatacatcaagcgcgctactggtgcgcgctggccattcgtaaacagaaccgcggacattcgccccgcgttcgccgttcagaatacgcgttgagcgaatttccagaagctcttgcccggaaagctgccgctgcagccagcgcaccgataaaaacaaaatcagaacgataaaaccgatcgccagcgttagcggcgccgtggtgatcagtgagtgaaaatagttacccatcgggtcctgataagccagacgtagcgacattcctggatgttttatcagcggtacgaccagctcgcgatacatgtcgctggtgccggctggccgataacctctggcacgagaatggctgtagacgctgcgctccccctgcaacagatcgacacgcacaatatcggaagcgatcatgagttcgtcgatttgcggcgtcagcgagacaatatcatgggtcaccaggtgcgtatcaatggctgtcgccgtcgcctgcacacggctgacatacttatactgtacggcgttataaaagcttagcgagcaacctatcagagtcacgaagatcgttaaccccgtgagcagcgtgataaaagctgagaatttcgtcgttaatcgcatccttgagttaactccgacggttataaacagtatgaaaaagcgaatctgaaggcggaattcgccacggcgcgcaatgaagcaggcatactaccaaaatggatctatctggcaatttattgcgttgcatcggcatcacgttttaattagcgagtatagtcttcgtagctatttttccaatctaccatgtaaagtgaggacaggttatgcaggcgttgatcttagaacagcaggacggtaaaaccctcgcatccgtgcaacatctcgaagagagtcaactgccggcaggtgatgtgacggtggatgtccactggtccagcctgaattataaagatgctctggctatcaccggaaaagggaaaattatccgtcattttccgatgattcctggtattgatttcgccggcaccgttcacgcaagcgaagatcctcgctttcatgcaggccaggaagtactactgactggctggggcgtgggcgaaaaccactggggcggcctggccgaacgcgcacgcgttaaaggcgactggctggtcgcgctgcctgcgggactgagcagccgtaacgccatgatcatcggcaccgccggttttaccgccatgctgtgcgtcatggcgcttgaagatgcaggtattcgcccgcaagacggtgaggttgtcgtcaccggtgccagcggcggcgtgggcagcactgccgttgcattactgcataagctgggctatcaggttgcagcagtatcaggacgtgaaagcacccacggctatcttaagagcctgggagctaaccgtattctcagccgcgatgagtttgctgaatctcgcccgttggaaaaacagctatgggccggtgcaattgataccgttggcgataaagtgctggcgaaagtgctggcacagatgaactatggcggttgcgtggccgcctgcggcctagcgggcggcttcgcgctgccgaccaccgttatgccattcattctgcgtaatgtgcgtttgcaaggggtagactcggtgatgaccccaccggcacgtcgcgcagaagcctgggcgcgtttggttaaggatctgccggaatcgttctatgctcaggccgccacagagattacgctggcggatgcgccgaagttcgccgatgccatcatcaataatcaggttcagggccgtacgctggtgaagataaaataacgtcacgtataaaaaaatttacacttaattaactatttatttttacacattgacacactccctgtcatattcactacacgccatgttgtggtgggtagaccgggagtctgtgatgaaaaagatacgtccattaacagaagccgatgtgactgcggaatcggctttttttatgcagcgccgacaggtgctaaaagcattaggcatcagcgcggccgccttatccttaccctcaacggcgcaggccgatctcttcagttggtttaaaggcaacgatcgtccgaaagcgcctgccggtaaaccgcttgagtttagtcagcctgccgcctggcgaagcgatttagcgttaacgccggaagataaggtgacgggctacaacaatttctatgagtttggccttgataaagccgacccggcggccaatgccggaagtctgaaaaccgaaccgtggacgttgaaaatcagcggggaagtcgcgaagccatttacgctggattacgacgatttaacacatcgtttcccattagaagagcgtatctatcgaatgcgctgcgtcgaagcgtggtccatggtcgtgccgtggattggtttccctttatataagctactcgcgcaggcacagcccaccagccacgctaaatatgtggcattcgaaacgctatacgcgccggatgatatgccaggacagaaagatcgctttattggcggcggactgaaatacccttatgtcgaagggctacgtctggacgaagccatgcatccgctgactctgatgaccgttggcgtctatggtaaggcgttacccccgcaaaacggcgcgcctattcgactcatcgttccatggaagtatggttttaaaggtattaaatctattgtcagcattaaactcacccgcgaacgtccgccaaccacctggaatttgtcggctcccaacgaatatggtttttatgccaatgtgaacccgcatgtggatcatccacgctggtctcaggctaccgaacgctttattggttcaggcggtatccttgatgtgcaaaggcagccgacgctgctgtttaacggctacgccaatgaagtcgcttcgctgtatcgcggtctcaatttgcgggagaatttttaagtgcgtctgacagcaaaacagataacctggctaaaagtttgtctgcatcttgccggttttttgccgcttctgtggctcttttgggcgataaatcacggtggactcagcgcagacccggtaaaggatatccaacactttaccggcagaaccgcgctcaaatttttgctcgccaccttgctggtttcaccgctggcgcgctacgctaaacagccattattgatacgcacacgccgcctgttaggattatggtgtttcgtttgggctacgctgcatttaaccagctatgccttactggaactggggatacataacctggcgctgttaggaagcgagttgatttcacgcccttatttgacgcttgggatcattagctggctggtgttattggcgctgacgttgacctcaacgcaatttgcgcagcgtaaattgggcaaacgctggcaaacactgcataacgtcgtctatcttgtcgcgatcctggctcccatacattacctgtggtcggtaaagattttatcaccgcaaccggtcatctacgcggcattagcgttagcccttttagcgttgcgttaccggaagtttcgccagtggtggcgctagtttggtgaactgtgcggtcgattgcaaaacgcaaaacaggtaatgtcctttttatgtttcgggttgattatcttccctgataagaccagtatttagctgccaattgcgacgaaatagttataatgtgcgactttacattgcccaacggcgattttcgttcgcagaaagggtgacaatcgagcaatgaaggtatattttgttttttgcccgaaaatggcagaagatagccacacaatgactggcaaatcatgaatttcaccttcgggtgctacggcataacaggcaaatcaaagatgcgcggtattttacccgcggcagtcattcacatgctttacagacggcgctaaaacgcctgtcacaatcacactaaacaaagagtacggaacccactcatggatattcgtaagattaaaaaactgatcgagctggttgaagaatcaggtatctccgaactggaaatttctgaaggcgaagaatctgttcgcatcagccgcacaacggcaaacgccggttttccggtgatgcagcaggcttatgcggcgccgatgatgcagcaacccgctctgtctaacgctgtcgcgccagcggctactccagcaatggaagcgcctgccgcagcggaaatcagtggtcacatcgtacgctccccaatggttggtactttctaccgcaccccaagcccggacgcgaaagcgttcatcgaagtgggccagaaagtgaacgtgggcgataccctgtgcatcgttgaagccatgaaaatgatgaaccagatcgaagctgacaaagcaggtactgtgaaagcgattctggtcgaaagtggtcaaccggtagaatttgacgagccactggtcgtcatcgagtaacgaggcgaacatgttggataaaattgtcatcgccaaccgcggcgagatcgcactacgtattcttcgagcctgtaaagaactcggcatcaagaccgtcgctgtgcactcaagcgcggatcgcgatttaaaacacgtattgctggcggatgagacggtctgtattggtccggcaccgtccgtaaaaagttatctgaacatcccggctatcattagcgccgctgaaatcaccggcgcggtggcaatccacccgggttacggcttcctttctgagaacgccaattttgccgagcaggttgaacgctccggctttatctttatcggcccgaaagcggacaccatccgcctgatgggcgataaagtgtccgcgattaccgcgatgaaaaaagcgggcgtgccgaccgtaccaggatctgacggcccgctgggcgacgatatgaatgcgaaccgcgctcatgccaaacgtattggctatccggtgatcatcaaagcgtccggcggcggcggcggccgcggtatgcgcgtagttcgtagcgatgctgaactggcgcagtccatctccatgaccaaagcggaagcgaaagcagctttcagcaacgacatggtatacatggaaaaatacctggaaaatccacgccacatcgaaattcaggtgctggcggacggccagggcaacgctatctatctggcggaacgcgactgttccatgcagcgtcgccaccagaaagtggttgaagaagccccggcgccaggcattacgccggaactgcgtcgctatatcggcgaacgctgcgcgaaagcgtgcgtagacatcggctatcgcggcgcagggacgttcgaattcctgttcgaaaacggcgagttctatttcatcgaaatgaacacccgtattcaggttgaacacccggtgactgaaatgattaccggcgtcgatttgatcaaagagcagttgcgcatcgcggcgggtcagccgctgtcgatcacacaggacgaagttgtcgttcgaggccatgcggtagaatgccgtatcaatgccgaagatccgaacaccttcctgccaagcccaggcaaaatcacgcgcttccatgcgcctggcggctttggcgttcgttgggaatcccatatctacgcgggctacacggtgccgccgtactatgattccatgatcggcaaactcatctgctacggtgaaaaccgcgacgtggcgattgcccgtatgaaaaatgccctgcaggaactgattatcgatggtatcaaaaccaatatcgatctgcagacccgcatcatgaatgacgagcacttccagcacggtggaaccaacatccactatctggagaaaaaactcggtcttcaggaaaagtaatcgcacgttaatctcaaaaggccggtgaatccggccttttttatttctggggatagcgatgccccatcatgtacaattcccgctttcttcacccataagggacaaaaaatggacgctcgttttgttcaggcccataaagaggcgcgctgggcgctgtggctgaccctttgctatctggcggcatggttagtggctgcttacttacctggagactcgccgggaatcaccggtctgccgcactggttcgagatggcctgcttattgacgccgctggtctttattttgctgtgctgggcgatggtgaaattcatttatcgcgatatttcgctggaggatgacgatgcagcttgaggtcattctaccgctggtagcctatctggtcgtggtcttcggggtctcgatttacgctatgcgcaagcgtaccgccggcacctttttaaacgaatattttcttggcagccgttcgatgggcgggatcgtgctcgcgatgacgcttaccgccacctatattagcgccagttcatttatcggcggtcccggcgcggcttataaatacggtctgggctgggtcttgctggcgatgatccagcttcccgccgtctggctttcactgggtattctgggtaaaaaattcgctatcctggcgcgtcgctataatgccgtcacgcttaacgatatgctattcgctcgttaccaaagccgcctgctggtgtggttggcaagcctgagtttattggtcgcgtttattggcgcaatgaccgtacaatttatcggcggcgcgcgactgctggaaaccgcggcgggaattccctacgaaaccggcctgctaatatttggcgtcagtatcgcactctatacggcgtttggcggctttcgcgccagcgtacttaacgatacgctacagggcctggtgatgctggtcggcacgatagtgctgctggtgggcgtgatccatgcggcgggcggtctaagtcaggccgttgacacgctgcacgctctcgaccccaaactggtaacgccgcagggcgccgatgacatactttctcccgcctttatgacctctttttgggtactggtctgttttggtgtgattggcctgccgcatacggcggtgcgctgcatctcctataaagacagtaaagcggtacaccggggcattattatcggtacgattgtcgtggcgattttaatgttcgggatgcaccttgccggcgcgctgggtcgcgcggtgcttccggatctgacggtgccggatctggtgatcccaacgctaatggtgaaagttttgccgccgtttgccgccgggatcttcctcgctgcgccaatggcggcgatcatgtcaacaattaacgcccaactgctgcaaagttccgcgacgatcattaaagatctctatctcaacctgcgccccgatcagatgcaaaatgagatccggctgaagcgtatgtcggcagcgattacattactgctaggcgcgctgttgctgctggccgcatggaaaccgccagagatgatcatttggctcaacctgctggcgtttggcggcctggaagcggtgttcttatggccgctggtattgggcctttactgggagcgggcaaacgcggcaggcgcattaagcgccatgatcgtgggcggcgtgctatatgccctgcttgccacatttaatattcagtacctgggctttcatccgattgtgcccgcgttactgttaagtttattggcttttctgatcggaaaccgattcggctcttccgcttcgcaagccaccgtattgtctactgataaataaagagttttgccatgccatggatccaattgaaactgaataccaccggcgcgaatgctgaagagctgagtgatgcgctgatggaagcgggcgccgtttccattacctttcaggatacgcacgatacgccggtttttgagccgttgccgggcgaaacccgtctgtggggcgataccgatgtgatcggtctgttcgacgccgaaaccgacatgaaagacgttgtcgcgattctggagcaacatccgctgctgggtgccggatttgcccataaaatcgaacaactggaagataaagactgggaacgcgaatggatggataatttccatccgatgcgttttggcgagcgtctgtggatttgtcccagctggcgtgacattccggacgagaatgccgtcaacgtgatgctcgacccgggactggcgttcggtacgggtacgcaccccaccacctctttatgtctgcaatggctggacgggctcgatctcaacggcaaaaccgtgatcgactttggctgcggttcaggcattctagcgattgccgcgctgaaactgggagcggcaaaggcgattggtattgatatcgatccgcaagctattcaggccagtcgcgataatgctgaacgcaacggcgtgtctgaccggctggagctgtacctgccgaaagaccagccagaagccatgaaagccgacgtggtcgtcgctaacatcctggcaggcccattacgcgaactggccccgttaatcagcgtactgcccgttgagggcggtctgctggggctttcaggtattctcgccagccaggcggaaagcgtctgcgatgcttacgccgagcttttcactctcgacccggtcgtcgaaaaagaagaatggtgccgcattactggccgtaagaaataattcttgtcagcgtggtcgcccggccacgcttttctccacacaactgccttaacgcctttcaggcaccgagacatcattaaattcatcaaatgaatgcctgaaataacttctttgtcactatccgtctggataaacagctgctaccagcggacaaaagatactggcgttttaacgggtcgcagccatcgccctcgtacttagtaatgctgtccgggttgttctgcagcatccgctaaccctctcttcagcgcagctggaaaaatttatccgtgccattcatgaacacaaaagcgcatctgtgcgcccccttccgactggcaatggagaaaaatcacgcgcagcgggaagtgatcttgtcctgaaacgagacggcgatcccattcatttggggtaattagcttataaaaaaagcagattattccgcttatcttgtttctggacgaagaaatagagagaagttacgggaatttgtaagcgcgtacaaaaccgccgacaataaataaccctatgattttaatgaattataaatttattttgctgtttttaagcacgattcattgatctacaacagtggattgttcaaagtttggcctttcatctcgtgcaaaaaatgcgtaatatacgccgccttgcagtcacagtatggtcatttcttaactcatgcgcatcggacaatatcagctcagaaatcgcctgatcgcagcgcccatggctggcattactgacagacctttccggacgctgtgctatgagatgggagcaggattgacagtatccgagatgatgtcttctaacccgcaagtgtgggaaagcgataaatctcgtttacggatggtgcacgttgatgagccaggaattcgcacggtgcaaattgccggtagcgaccctgttgagatggccgatgccgcacgtattaacgtggaaagcggcgcccagattattgatatcaatatggggtgcccggcgaagaaagtgaatcgtaagctggcaggttcagccctcttgcagtacccggatttagtgaagtctatactcatcggggtcgtaaacgcagtggacgttcctgtgactctcaagattcgcaccggctgggcgccggaacaccgtaactgcgtagagattgcccaactggctgaagattgtggtattcaggctctgaccatccatggccgcacccgcgcctgtttgttcaacggagaagctgaatacgacagtattcgggcagttaagcagaaagtttccattccgattatcgcgaatggcgacattactaacccgcataaagccagagctgttctcgactatacaggggcggatgccctgatgataggccgcgcagctcagggaagaccctggatctttcgggaaatccagcattatctggacactggggagctgcttccgccgctgccgctggcagaggtaaagcgcttgctttgcacgcatgttcgggaactgcatgacttttacggtcaggcaaaagggtaccgaatcgcgcgtaaacacgtctcctggtatctccaggagcacgctccagacgaccagtttcggcgcacattcaacgctattgaggacgccagcgaacagctggaggcgttggaggcatacttcgaaaattttgcgtaaacagaaataaagagctgacagaactatgttcgaacaacgcgtaaattctgacgtactgaccgtttctaccgttaactctcaggatcaggtaacccaaaaacccctgcgtgactcggttaaacaggcactgaagaactattttgctcaactgaatggtcaggacgttaatgacctgtatgagctggtactggctgaagtagaacagcccctgttggacatggtgatgcaatacacccgtggtaaccagacccgtgctgctctgatgatgggcatcaaccgtggtacgctgcgtaaaaaattaaaaaaatacggcatgaactaatttcgattagctaactgcttgtttaaaaaggcgctactcggcatggggaagcgccttttttatacgcatcacatggaatttggtcatgaaagcggaatgtgaacctcagtactttggcgatgaatcgaagaagattattcacggtgacgcgctaacagaacttaaaaaactgccttctgaaagcattgacttaatttttgccgatccgccttacaatatcggaaaagatttcgacggtatggtggagtcctgggacgaagcgtcttttctggcctggctgtatgaatgcattgatgagtgccaccgcgtactgaagaaacacggcaccatgtacatcatgaatagcacagaaaatatgccgtatatcgatctcaaatgccgaacgctttttaccatcaaaagccgtatcgtctggtcctatgatagttccggggtgcaggcgaaaaaatactttggttctatgtatgaaccgatcctgatgatggtaaaaaacccgaaaagctatacctttaaccgtgatgcgattctggtcgaaaccactacgggcgctaagcgcgcgctaatcgattatcgaaaaaacccgccccaaccatacaatcagaaaaaagtgccgggcaacgtctggtcatttcctcgcgtacgttatctgatggatgaatatgaaaaccatcctacgcaaaagcccagcgcgctgttaaaacggatcatactggcctcttctaacccgagcgataccgtattggaccctttcgcgggcagtttcaccacaggcgctgtcgcagcggcgtcaggtcgtaagtttatcggtattgaactcaataatgagtacgtaaaaatggggctcagaagattgagcgtcacttcgcattattcagaaaatgaacttgcaaaagtcaaaaagagaaaaacacaaaacctgtccaaaaagcagcgaaatgtcgggataaacgcgctatcttcagagaagtaaaagcattgtaagtccgcttttcagcgtcaaaatttcatgtatattcccagcacgcatgggcatgaatacacaggatttgacgatgatacgtaagtattggtggctggttgtttttgccgtctccgtttttctttttgatgcgcttttgatgcaatggatcgaattgatggcaactgaacaggataagtgccgaaacatggattcggttaaccctctcaaattgatcaattgtaccgatctggagtagcgaaccgggcgatttaacctatgattatttatcacccggatttcttttatcccttataaaaacagggaattaaaacacgttgaggataaaagaaggggtgatactgtctcgtcctgttcttttcctgcataaccaatgagctaatgatacatgccggttagtgagtacaaccacatccttgtggcggtttcatttgctgtcgctatttttgcgtcctataccgcattaaatatggccggacgcgtagccggaagcgcccgatcaaacgccagaatatggctaatgggcggcggcttcgcgctgggcgtcggtatttgggcgatgcattttgtcgggatgctggcgatggatcacgcgatgaacatgcgcttcgatccgttcctcaccggcctctccatgctgatcgcgatcggctcctccctgtttgcgctatggctggtcagcgctgaaaaactgcgcctgcgccgtttactgccgggcgcgctggtgatgggactgggcatcagcgcaatgcattataccgggatggcggcgctgcaatttgcttccattatcgtctggaatagcgcgtgggttgccctctctatcattatcgcgctactggcgtcctgcggcgcgctgtggctcacgttccgcctgcgtcatgagggaacagatgtcgccctgaggcgagcaggcgccgcggtattaatggggatagctatcgccggcatgcattacgccggcatgaaggccgcacactttccccaaaactggccgatggagcatcgtggcgtcgatagcaactggctggctgttcttgtcagcgtggtcgcgctgactatcctgggtattactctgctggtttctttatttgacgcccggcttcaggcccgtaccgcactacttgcctcttcgctggcgcaggcgaaccaggaactggcgcagttggcgctgcatgatacgctcacccgtttaccaaaccgggtgcttcttgaggatcgtctggaacaggccatcagcaaagcgaatcgggaaaacacgtctttcgcgctactgtttatggatctggatggctttaaaaccgttaatgacgcttatggtcatgatatcggcgataagctactggtagcggtcacgcatcgtctgaaccaaccgctgagcgggcagtttaccctggcgcggattggcggcgacgaatttgtgctgcttgcagaagtcagcgcgcctgacgaagcggcttcccttgccagcgcgctggtacattcgatagatgcgccctttacaatagatccgtacgaactggtcgtcacccttagcgtgggaatagcgctctatccgctggacggaaaaaacgaacgggaactgatgttcaacgccgatgccgcaatgtaccacacgaaacatacggggcgtaacggataccatttctttcagccatcaatgaatatgctggcgcaaacccaacttcagctaatgaatgacctgtggctggcgctggaaagacaagagctcaggctagtgtatcagcctaaatttcaggctcctgccggccctattgtaggatttgaggccctgttgcgctggtatcatccaaaacaaggcgtactgaatcctgaccagtttttaccgctggcggaaaaaacgggtcttatcgtcactatcggtagctgggtgatagacgaggcgtgtcgacagctccgcgagtggcacttacagggatacgacttatggtcagtggcggtaaatctgtccgccttacaatttgagcagcccgggcttgtggacaccattacgcggagcctggcccgacacagtatccgtcccgatttattgattctggaaatcaccgaaaccacggcgatgaacaagccagagcaaagcgtcgctatactcaccagattaacggaaatgggggttaaggcctctattgacgactttggcaccggttattccagccttctctatctgaaacgtcttccggcgtgcgaactaaaaattgatcgcgctttcgtacatgaactcagcgaggcaggcgacggcgcgaccattgttgcggctattgtcgcgctggcgaaagcgttaaatctgcaaattgtggcagaaggggtagagaatgaaacgcagcaacaatttttgacccagttaggatgccatacgcttcaggggttcctgcttggcaagccgcgtacggcagaggaaattgctcgcgatattcgggatcctgccaatatattcacaaggtcaatatataatatcaactcaaaataatctcaggcttcttccgcctgttgttcatttggcattaattgcctcacactgccatccgggcttagcatttttaatacattatcgactaatgcaggcgcctgcttataaagatcataacttgtgggattcattaaccagttttttactattccgctaaaactaccatgcagaataattaatatgacatccagatcaagactgcctgagatcagttttttatccatacatcgctgtaatacttcaagcagcgactgatgatggaaacccatcttctcccgaatggcctgttccgatatcataccattatggaattcacatttatgatataaaatctgcattaatgcctgctgacgaggcactgccgcaatatattgtaaggctgcaataaatttctctcgtagatcctgtaaaggattatcattccagcatcccgtaagcctatcctgaataagttcgcgtaaaggtggttgctgtaaccaaacctcattaaacaactgcgttttattctcaaagtgccagtagatggcgccccgcgtgacatcagcggcatcagcgatatcattcaacgtcgtgttggcaacgccgcgcaaagcgaactgcgcaatagcggtttcaatcaaatgttgccgcgttttaagcgcatccgccttcgttttcttcgccataattaagatatcctggaccataaaaacgataaatacgctgataaaatactcagcacaaaaaacaactttatcatgtcctttttagtcagacgagagacagctatttttatttcgcacaatatcgccaaatcaataataaaaacaaataaattaataaaacacattcatataaaatatatatttctatttatgttattcaacatcatgattttactaatcgggacattatgaaacgacagggaatagttctttttttttgcttttatgtgccgtgaaccccatcccaaaataagtattgcttacatcacaagctaataatttgtaggataccccactgctattctatttttcgcgcgttaacgccttaccgttatccggtgaataacgagctttcggttttttaaggaacagtaatgacgaaacatgccaggttttcactcctgccctcattcatcatattctctgctgcgctgctggccggttgtaatgaccagggagatacccaggctcatgccggcgagccgcaagtcaccgtccatgtggtcgaaacagcgccgctagccgtaacgaccgaacttcccggacgtacgtccgcatttcgcattgcggaggttcgcccccaggtgagcgggatcgtgcttaaaagaaacttcaccgaaggtagcgatgtagaggccgggcagtcgctctatcagatcgatcctgccacttatcaggctgattatgacagcgctaaaggcgaacttgctaaaagcgaagcggctgcggctatcgcgcacctgacggtcaaacgctatgttccactggtcggcacaaaatatatcagccaacaggaatatgatcaggcgattgccgacgcccgccaggccgatgccgccgttgtggcggcaaaagccgctgttgaaagcgcgcgtattaaccttgcgtataccaaagtcacctcacccatcagcgggcgtataggaaaatctaatgtgactgaaggcgcgctggtgactaatggtcagtcaactgaactggctaccgtgcaacaactcgatccgatttatgtcgacgtgacgcaatcaagcaacgactttatgcgactcaagcaatccgtcgaacaaggtaacctgcataaagacagcgccagtagcacggttcaactggtaatggaaaatggtcaggtctacccgattaaaggcacgctgcaattttccgacgttaccgtagatgaaagcaccggctctatcacgctcagggcggtgttccctaacccgcaacacagtctgcttcccggtatgtttgttcgcgcccgcattgatgaaggcgtccagcccaatgccatccttgtcccccagcagggcgtaacccgcacgccgcgcggcgacgcaatggtgatggtggttaacgataaaagccaggtcgaagcccgcaatgtcgtggcggcgcaggctattggcgataaatggctcatcagcgaagggttaaaaccgggcgataaggtcatcgtcagcggcttacaaaaagcgcgaccgggcgtccaggtgaaagccactaccgatgctcctgcagcgaaaacggcgcaataaggtaaccgtacatggcaaacttttttattagacgtcctattttcgcctgggttctggccattatcctgatgatggctggcgcactggcaataatgcaacttcccgttgcgcagtatccaaccattgcgccgccagcggtttctatttctgcaacctatcctggcgcggatgcgcagacggtacaggatacggttactcaggttatcgaacaaaatatgaacggtatcgataacctgatgtatatgtcctctaccagcaactctgctggtagcgtgaccatcaccctgaccttccagtccggaaccgatccggatatcgcgcaggttcaggtgcaaaataaattgcagctcgccacgcctttactgccgcaagaagtccagcagcaggggattagcgttgaaaaatccagcagcagctttttgatggtcgccgggttcgtctcagataatccgaacactacccaggacgacatctctgactatgtcgcctctaacattaaggattctatcagccgtctgaatggtgtgggcgacgttcagctatttggcgcacagtacgccatgcgtatctggctggatgcgaatctgctaaataaataccagctcacgccagttgacgtcatcaaccagttaaaagtacagaacgaccagattgcggcaggccaactgggcggcacgccagcattaccgggccagcagcttaacgcctcaatcatcgcccaaacgcgtctgaaagatccggaagagttcggcaaagttacgttgcgcgtcaataccgacggctctgtcgtccatctcaaagatgtcgcgcgtattgagcttggcggtgaaaactataacgttgtagcgcgcattaacggtaaaccggcctccggtctcggtattaaactggcgaccggcgctaacgcgctggataccgcaaccgcaatcaaagtgaaactggcggagctgcagcctttcttccctcagggaatgaaggtggtttatccttatgacacaacgcccttcgtaaaaatatctatccacgaagtggtaaaaacgctgtttgaagcgattattctggtgttcctggtaatgtatctgttcttacagaatatccgggcaaccctgattcctaccatcgctgttcctgtcgtgttgctaggcacttttgcggtactcgccgcctttggctattccatcaataccctgacgatgtttggtatggtactggcgatagggctgttggttgacgatgcgatagtggtcgtagaaaacgttgaacgtgtaatgatggaggataacctttctccccgagaggcgacggaaaaatccatgtcgcagattcagggagcgctggttggtatcgcgatggtactgtctgcggtatttatcccgatggccttttttggcggctcgaccggggcaatttatcgccagttctctattactattgtttcagcaatggcgctatccgttctggttgcgttgattctgacgccagcactgtgcgctacgctgcttaaacccgtatctgctgaacatcacgagaaaaaaagcggcttctttggctggttcaataccaggtttgaccacagcgttaaccactatactaacagcgtaagcggcatcgtgcgtaatacgggtcgctatctcattatctatctacttattgtagtcggaatggcggttctgtttttacgcctcccgacctccttcctgccggaagaagatcagggagtattcctgaccatgattcagctcccctctggcgctacgcaagaacgtacgcagaaagtgctggatcaagtcactcattactacctgaataatgaaaaagcgaacgtcgaaagcgtgtttaccgtaaacggctttagctttagcggtcagggacaaaactcagggatggcatttgtcagccttaaaccctgggaagagcgtaacggtgaagaaaatagcgtcgaagccgttatcgccagagcgacacgcgcctttagccagattcgcgacgggttggtgttccccttcaacatgccggcaattgtcgagttaggtaccgcaacaggtttcgacttcgaactgattgatcagggaggactcggtcacgatgcgttaacaaaagcgcgtaatcaactcctgggtatggtcgcgaagcatcctgatctattagtgcgcgtacgcccgaacgggctggaagacacgccacagttcaagctggatgtcgatcaagaaaaagcgcaggcgctcggcgtttcgctgtctgatatcaacgaaaccatctccgcggcgttgggcggctattacgttaacgactttatcgatcgcggacgagtgaaaaaagtatacgttcaggctgacgctcagttccgtatgctgccgggagatatcaacaatctttatgttcgcagcgctaatggcgagatggtgcccttctctacctttagctcagcacggtggatttatggttcgccacgcctggaacgctataacgggatgccgtcaatggaactgctcggcgaagcagcacccggacgaagcaccggtgaagccatgtcgttaatggaaaacctggcttcacagctaccaaacggtattggctatgactggacaggtatgtcgtatcaggaacggttgtcaggtaaccaggcgccggcgctgtacgcaatctcactcattgtcgttttcctctgccttgccgctctgtatgaaagctggtcaattccgttctcggtaatgctggtcgtaccgctcggcgtggttggcgctctgcttgcagcgtcattgcgcggtctgaacaatgacgtttacttccaggttggcttgttaaccactattggcctttctgctaaaaacgccatcctgattgtcgagttcgccaaagatctcatggaaaaagaaggacgtggattgattgaagcgacgctggaagcatcccgtatgcgtttacgtcctattctaatgacctcgctggcctttattctcggggtaatgccgttagttatcagtcgtggcgcaggtagtggtgcacagaacgcagtaggcacaggggttatggggggaatgttaaccgcaaccttattagctatcttcttcgtgccggtattcttcgttgttgtaaaacgccgatttaatcgccatcatgattaaccggtaaacagaggcgtcttcggacgcctttttaaacggtacgtctttatctccgctattccccctctccgcttacctctgcattctccatagtttttacaattcacatgaattgagatgattcctcatgtcggccattttttctgtggtggtaaaataactctcgttttcgcagcggttagagccagcattacgttgctgtacttcgcgaaacgctgattaatgaggtaacaccatgaaaagactaattccagttgcattgcttaccaccttattggcaggttgtgcacatgattctccctgcgtaccggtttatgacgatcaagggcggctggttcataccaatacatgtatgaaaggtacaacgcaggataactgggagacagcaggcgctattgctggcggcgctgcggcggtagcagggttgacgatgggtatcattgcgctttctaaatgatacatgcaggcgcggcaatgccgcgctttcagtaataatataaaggtcgtaaggatactcagcgacgtaatctgttcagcctgtcccccgaaagttaacacgataaaacgctctcttttcttactcgcccatcccgatggtatttattctattccttgtccgatgcagacaaaattatagcttgatagcatcgtaagccgcattacaaacaggctttatacagtaagacttagagcgtgatcattaggcgtaattattacagacagtctggatataaaccggaacatacacgtaatacatgaggattttgagcactgtccctaggccaaactggcaaataaaatagcctaatgggccagatttttagtcctcagcgaatatctctattgcttattagaggcgtaagtaaaagccgtttgtacatctacttcagcacggttcacattcgatggttcaggcggatatatggtgggaaatcacgttgactaaaacggtttttatccactctacgaagatgtttaaaacgcgtcggcgtcattatccgataactttttccatagagagataaatgcaaaaaggcccagtctttcgattgggccctttgctttatttgatgtctggcagtttatggcgggcgtcctgcccgccaccctacgggccgttgctgcgcaacgttcaaatccgctcccggcggatttgtcctcctcaggagactactcaccgacaaacaacagataaaacaaaaggcccagtctttcgactgagccttttgttttatttgatgtctggcagttccctactctcgcatggggagaccccacactaccatcggcgctacggcgtttcacttctgagttcggcatggggtcaggtgggaccaccgcgctactgccgccagacaaattctttttcaaataccgaactttaaccgtattaagtggtgctgatacccagagtcgaactggggacctcacccttaccaagggtgcgctctaccaactgagccatatcagcacactaaatttgatgcctggcagttccctactctcgcatggggagaccccacactaccatcggcgctacggcgtttcacttctgagttcggcatggggtcaggtgggaccaccgcgctagtgccgccaggcaaattctgttatcagaccgtttttacgttctgatgtaatctgaatcagtgctgaaaatcttctcttaaccgccaaaacatcttcggcgttgtaaggttaagcctcacggttcattagtaccggttagctcaacgcatcgctgcgcttacacacccggcctatcaacgtcgtcgtcttcaacgttccttcaggagactctaagtctcagggagaactcatctcggggcaagtttcgtgcttagatgctttcagcacttatctcttccgcatttagctaccgggcagtgccattggcatgacaacccgaacaccagtgatgcgtccactccggtcctctcgtactaggagcagcccccctcagttctccagcgcccacggcagatagggaccgaactgtctcacgacgttctaaacccagctcgcgtaccactttaaatggcgaacagccatacccttgggacctacttcagccccaggatgtgatgagccgacatcgaggtgccaaacaccgccgtcgatatgaactcttgggcggtatcagcctgttatccccggagtaccttttatccgttgagcgatggcccttccattcagaaccaccggatcactatgacctgctttcgcacctgctcgcgccgtcacgctcgcagtcaagctggcttatgccattgcactaacctcctgatgtccgaccaggattagccaaccttcgtgctcctccgttactctttaggaggagaccgccccagtcaaactacccaccagacactgtccgcaacccgggtaacgggtccacgttagaacatcaaacattaaagggtggtatttcaaggtcggctccatgcagactggcgtccacacttcaaagcctcccacctatcctacacatcaaggctcaatgttcagtgtcaagctatagtaaaggttcacggggtctttccgtcttgccgcgggtacactgcatcttcacagcgagttcaatttcactgagtctcgggtggagacagcctggccatcattacgccattcgtgcaggtcggaacttacccgacaaggaatttcgctaccttaggaccgttatagttacggccgccgtttaccggggcttcgatcaggagcttcgcttgcgctgaccccatcaattaaccttccggcaccgggcaggcgtcacaccgtatacgtccactttcgtgtttgcacagtgctgtgtttttaataaacagttgcagccagctggtatcttcgactgacttcagctccatgagtaaatcacttcacctacgtgtcagcgtgccttctcccgaagttacggcaccattttgcctagttccttcacccgagttctctcaagcgccttggtattctctacctgaccacctgtgtcggtttggggtacgatttgatgttacctgatgcttagaggcttttcctggaagcagggcatttgttgcttcagcaccgtagtgcctcgtcgtcacgcctcagtgttaaagtgaaccggatttacctggaacacacacctacacgcttaaaccgggacaaccgtcgcccggccaacatagccttctccgtccccccttcgcagtaacaccaagtacgggaatattaacccgtttcccatcgactacgcctttcggcctcgccttaggggtcgactcaccctgccccgattaacgttggacaggaacccttggtcttccggcgagcgggcttttcacccgctttatcgttacttatgtcagcattcgcacttctgatacctccagcatgcctcacgacacaccttcacaggcttacagaacgctcccctacccaacgaacgtatccctaagccaactcgactttaatgaacgctttgacgtcgcttcgctccgtcaatcgtcaactccgtaaagttgtcttgggtgatacgttcgctgccgcagcttcggtgcatggtttagccccgttacatcttccgcgcaggccgactcgaccagtgagctattacgctttctttaaatgatggctgcttctaagccaacatcctggctgtctgggccttcccacatcgtttcccacttaaccatgactttgggaccttagctggcggtctgggttgtttccctcttcacgacggacgttagcacccgccgtgtgtctcccgtgataacattctccggtattcgcagtttgcatcgggttggtaagccgggatggccccctagccgaaacagtgctctacccccggagatgaattcacgaggcgctacctaaatagctttcggggagaaccagctatctcccggtttgattggcctttcacccccagccacaggtcatccgctaatttttcaacattagtcggttcggtcctccagttagtgttacccaaccttcaacctgcccatggctagatcaccgggtttcgggtctataccctgcaacttaacgcccaattaagactcggtttccctccggctcccctatacggttaaccttgctacagaatataagtcgctgacccattatacaaaaggtacgcagtcacaccccgaagggtgctcccactgcttgtacgtacacggtttcaggttctttttcactcccctcgccggggttcttttcgcctttccctcacggtactggttcactatcggtcagtcaggagtatttagccttggaggatggtccccccatattcagacaggataccacgtgtcccgccctactcatcgagctcacagcacatgcgcttttgtgtacggggctgtcaccctgtatcgcgcgcctttccagacgcttccactaacacacatgctgattcaggctctgggctcctccccgttcgctcgccgctactgggggaatctcggttgatttcttttcctcggggtacttagatgtttcagttcccccggttcgcctcattaacctatggattcagttaatgatagtgtgacgaatcacactgggtttccccattcgggtatcgccggttataacggttcatatcaccttaccggcgcttatcgcagattagcacgcccttcatcgcctctgactgccagggcatccaccgtgtacgcttagtcgcttaacctcacaacccgaagatgtttctttcgattcatcgtcgtgttgcgaaaatttgagagactcacgaacaactttcgttgttctgtgtttcaattttcagcttgatccagatttttaaagagcaaatatctcaaacgtgactcgtaagtcagttttgagatattaaggcaggtgactttcactcacaaaccagcaagtggcgtcccctaggggattcgaacccctgttaccgccgtgaaagggcggtgtcctgggcctctagacgaaggggacgtatcagtctgcttcgcaagacgccttgctatttacttttcatcagacaatctgtgtgagcactgcaaagaacagttctttaaggtaaggaggtgatccaaccgcaggttcccctacggttaccttgttacgacttcaccccagtcatgaatcacaaagtggtaagcgccctcccgaaggttaagctacctacttcttttgcaacccactcccatggtgtgacgggcggtgtgtacaaggcccgggaacgtattcaccgtggcattctgatccacgattactagcgattccgacttcatggagtcgagttgcagactccaatccggactacgacgcactttatgaggtccgcttgctctcgcgaggtcgcttctctttgtatgcgccattgtagcacgtgtgtagccctggtcgtaagggccatgatgacttgacgtcatccccaccttcctccagtttatcactggcagtctcctttgagttcccgacctaatcgctggcaacaaaggataagggttgcgctcgttgcgggacttaacccaacatttcacaacacgagctgacgacagccatgcagcacctgtctcacagttcccgaaggcacaaatccatctctggattcttctgtggatgtcaagaccaggtaaggttcttcgcgttgcatcgaattaaaccacatgctccaccgcttgtgcgggcccccgtcaattcatttgagttttaaccttgcggccgtactccccaggcggtctacttaacgcgttagctccggaagccacgcctcaagggcacaacctccaagtagacatcgtttacggcgtggactaccagggtatctaatcctgtttgctccccacgctttcgcacctgagcgtcagtctttgtccagggggccgccttcgccaccggtattcctccagatctctacgcatttcaccgctacacctggaattctacccccctctacaagactcaagcctgccagtttcgaatgcagttcccaggttgagcccggggatttcacatccgacttgacagaccgcctgcgtgcgctttacgcccagtaattccgattaacgcttgcaccctccgtattaccgcggctgctggcacggagttagccggtgcttcttctgcgggtaacgtcaattgctgcggttattaaccacaacaccttcctccccgctgaaagtactttacaacccgaaggccttcttcatacacgcggcatggctgcatcaggcttgcgcccattgtgcaatattccccactgctgcctcccgtaggagtctggaccgtgtctcagttccagtgtggctggtcatcctctcagaccagctagggatcgtcgccttggtgagccgttacctcaccaacaagctaatcccatctgggcacatctgatggcaagaggcccgaaggtccccctctttggtcttgcgacgttatgcggtattagccaccgtttccagtagttatccccctccatcaggcagtttcccagacattactcacccgtccgccactcgtcagcgaagcagcaagctgcttcctgttaccgttcgacttgcatgtgttaggcctgccgccagcgttcaatctgagccatgatcaaactcttcaatttaaaagtttgatgctcaatgaattaaacttcgtaatgaattacgtgttcactcttgagacttggtattcatttttcgtcctaggacgttaagaatccgtatcttcgagtgcccacacagattgtctgataaattgttaaagagcaggtgcgacgcggcttgcagctcaccgtcgcgaggtggcgtatattacgctttcctctttcagagtcaaccctgaatttcaggatttttctcttcaaccgaccggctgtttgtgtgaagtgattcacatccgccgtgtcgatggaggcgcattatagggatcccatttttttgcacaagcgttttttggatctttttttctgtttgttgatttttcatccctttcgctccattcctgcgcaaagtggcgattttttgatgctatctccccttgcacaacgccgttaaagcaaccaaagtcttcatgactattcatttatgatgaggtagacatgtctgacacattacgtccttataagaatctttttcctggtatcggtcagcgcgtgatgatcgataccagcagcgtggttattggcgatgtccgtctggcggatgatgtcgggatctggccgcttgtggtgattcgcggcgatgtgaattacgttgcgataggggctcgtacgaacattcaggatggcagcgttcttcacgtaacccacaagtcttcatccaatccacacggcaacccattaatcattggcgaagatgttaccgttggccataaagttatgctgcacggctgtaccatcggtaaccgcgtactggtcggtatgggctccattgtgctggatggcgcgataatagaagatgacgtaatgattggcgcgggaagcctggtgccgcagcacaaacggctggaaagcggctatttatatcttggcagtccggtaaaacagatccgccccttgagcgatgctgagagatcgggcctgcagtactccgccaataactatgtaaagtggaaagacgactatctttctcaggataaccatatccaaccgtgatcatcttcctgctgggccaggattaatgcttccgcctcttcttccaggtcccagcgatactcacgaaaaatggccagccattgctccgctgtttctccaccaaagcgatacgccagtacatctttttttattgcacacgtgagttgcatcccattaaccagggcgggaaagatgatagcactggcggcagtatcccattcttcgcggtcaggaaattgtatggcctggttcacgctaataattcctgctgtagctgctcaatcactggctcgacctgcggtaatacaccgtgccaaagcaaaacggcatgtgcagcctgccccaccagcattcccagcccatctgcgtagcgttttgcgccctgttgtacacaccaggagagaaatggcgtattccctttttgatagaacatgtcatagcaacagagggaagggtgaataagtgacgctggtatcgccgggatttcgccccgtatgccgctggaggtcgcattaataattaggtcaaactcacaaccatccagcttgtccatatccgtggcatgaacgctgccggtatgagcaaagattttcgccaacgcttcggcacgtgaagctgtacggttggtgatagtgaccgcgcaatccaaagaaagcagaggtaacagcacgccccgggatgcgccgcccgcgccaatcagcaaaatacgcaatcctgggcggataaaatttaaacgttcgagatcgcctaataaaccgataccgtcagtattgtcgccaagcaaacgaccatcttccagccgttttaatgtattgacggctcccgccagcgatgctcgttccgttaactcatccgaacgcgcaaacgcctcctctttaaaaggtactgtgatgtttgcgccttttccccctgccgcgaaaaaggcatcaagcgtattaatgaaattattaataggggccagcacgcgaccataggggtgaacaatatctagctgctgagcaaattgctgatgaataaatggcgatttgctgtgcgcaatcggatttccaaaaacagcataggtttccatcatattacccctgtcgaaacagttcgcccgtcagagcatcgcgaatttctgaaggatttaaacgcccacccgttgcgccttcaaccaccggaaaatcatcaccaaattgcgcacgcacctcttcaacggtacggcatggcggtaatccgctcagattggcgctggtggaaaccagcggtttgccatacgcattgcatagcgcgaccaccagcgggtggttggtaacacgaacggccagggaatcaaaacgtcccgtgagccaccgcggcgttgtcgcgggcgcaggaaaaacaaacgttaccggcccgggccagcaatcaaataccgctttacgctgtgcggcggtaagtatgctgtcatcaatataaggttttaactgctcaaagctggcggcaatcaaaatgagtcccttatcgacgggccgttgttttaacgccagcaggcgcgtaacggctgtttcactatcgggatcgcagccgacgccgaaaacggcttctgttggataagcgatgacattttctttattcaggagatctaccgctgcggcgatagatcctattggcaggttattattcacttgtttattccaccggaaccggctttccacattgtttactggcgcaaaagcgcttcacgccctgcgcggttttcttttcgatgagtagcggataatggcactcggggcattcccctgcaaccggtgtgaagttaatgacaaactgacattccgggtagcgatcgcaggaatgaaagattttaccgtaacgagaacggcgctggaccaaatgtccttgctggcaggctggacaggcaatcgccgtttcatccggtttatcaataaccactgtatgttcacattgcggatactgactgcatccgatgaacatgccaaagcgcccctgacgcaacaccagcacggcgccacactcagggcacagttgcccctccagaattttaacgatatgtccgtccgcctgacttttcagcggacgaacgtaatcgcattccggatagcgagaacagccgagaaacggaccatgtttcccggaacgaattaccagttcggccccgcactgcgggcagggctcatttttacgcaccgaaaacagtgctgatttagccatattcactcatgcagcattaacacctatcaatgcagcataccttcatttacctcaaagagtaattcttccatttgctgataggcgttttcacagcccggaatgttgaataacaccatcaaaataacccatttcaagtcttccaggtcaaactctgcggtatccagcgccagcacacgctcaatcaccatttctcgtgtttcgaggtttagcacctgaatctgctcaaggaataacaggaacccccggcaactggcatcaagcctttcacactcttcaaccgtataaatgcgcattgaaagagggtcggaagcaagttgcatgggttccgcgaggccatcctgatagtcagcgagtttttccagccacagcagcgcattgtagatgtcttcgcgatcaaacccagcgtcggtgagatcacgctccagtctgtcctgatccacgcgcagctcggcttcgttatggatgtatgtttcaaacaaatacattagtacgtcgaacatggcttgccctccttaatcggacatagccgccgggtacagctgcgatccatcctgctaactccagttcgagtagctgagccactaccgctggcacaggttggccggcacgttcagcgacgacgtcaacaggtgttacctcatctcctacgttagccaggagctcaggaaatggcaatgccgcctcatcctgatttagtgaataaagtgaattttccgccgtagttggcaaccagtgtaagccgtattgcaaattttccagaatatcctccggcgtcgtcacaagcgtggccccttgtttaattaaccagtgcgtgccttcgcttcccggactaccgataggacctggtaatgcaaaaacgtcccgcccctgttcaagcgcgcagcgcgccgtcaccaacgaaccgctgcgcaacgccgcctcgattaccagcacgcctttgctcagtccgctgatgatacggtttctgcgaggaaaatgttgcggtagcggaggcgttgaaagcggaaattctgagaccactgcgccgccggtggcaatcaagttttcagccagcatggcatgtcggcgaggataaatctttgccaagccattccctaacaccgctacactttttccccccatactcaccgcggcgttgtgtgctacgccatcaattccccgggcaaggccgctggtgatcgtcaaaccgcttttcgcaaggctttcgcaaagcagacgtccccagcgttctccataccaggagtggctccggctccctacgacggcaagttggcaggtatgcagacaggcaggatcgccgtcaataaaaatagcgccgggataatcgtcaatagcacgcagttggggaggataaatctcactatccgcacacagaaaatggtgctgcggtagttcaagccagcgtaatgtctcatcaagcacacctgctggaagctgtaaaaaacgttcagcttgccgcgcggtaagaccagcctcctgaaggtgcgtgcgatttatctgaggctggcgaataagcgagttcgccatgttcaacatcgcctcgccataaaggtcgccgacgtacattaaacgtaaccaaatttcggtacgggccatcctttccctcccctgccacaagcagtctgaacaatctttgcgattggtcactgatgctgtcaatcaggtggggatttgtctagaatagaggtaataatcttttcaactcctgaacacaactctggataattatgtcagttttgcaagtgttacatattccggacgagcgccttcgcaaagtcgcaaagccggttgaagaagtgaatgcagaaattcagcgtatcgtcgatgatatgttcgaaacgatgtacgcggaagaaggtatcggtctggccgcaacgcaggtcgatatccaccagcggatcatcgtgattgacgtttcggaaaaccgcgacgagcgcctggtactcattaacccggaattgctggagaaaagtggcgaaacgggtatagaagaaggctgtctgtcgattccggaacagcgcgctttagtgccgcgcgccgagaaagtgaaaatccgcgcgctggatcgcgacggcaacccgtttgagcttgaagcggatggtttgctggcaatttgcattcagcatgagatggatcatctggtcggtaaactgtttatcgattatttgtcgccgctgaagcaacaacgtattcgtcagaaagtagaaaaactcgaccgcctgaacgcccgggcttaaaggacaagaaccaacgtgtcagattcactacgtattatttttgcgggtacacctgactttgcagcgcgtcatctcgacgcgctgttaacttctggacataacgttgtcggcgtatttacccaacccgatcgtccagcaggtcgcggcaaaaagttgatgcccagcccggtaaaagtgctggcggaagaaaaaggcctgcccgttttccagcccgtgtcgcttcgtcctcaggaaaaccagcatctggtggctgacttacatgccgacgtcatggttgtcgtagcatatggtctgattctcccaaaggcagtgctggatatgccccgtctcggatgtatcaacgttcacggttcgctgcttccacgctggcgcggcgcggcgcctattcagcgctcactctgggcaggcgatgcggaaaccggcgtcacaattatgcagatggatgtagggctggataccggcgacatgctgtataaacttgcgtgcccgattaccgcagaagataccagtggctcactgtataataagttggctgaacttggcccgcaggggttaattaccacactaaaacaactggcggacggcacagcgacgcctgaagcgcagaatgaagcgctggtcactcatgcggaaaagctcagtaaagaagaagcgcgtatcgactggtctctctccgcagcacagctggagcgttgcattcgcgcctttaatccgtggccaatgagctggctggaaatcgacggccagccggtaaaagtctggcaggcgtccgtcattgaggacgccacgcagtcgctgccgggaaccattctggccgcgacgaaacagggcattcaggttgcaacaggcaaggggatattaaatttgctttcgcttcagcctgccggcaaaaaagcgatgagcgcccaggatctgttaaattcacgccgggaatggtttattcctggtaaccgtcttgcctgacggtcacgtctttataagcccggtgttaccgggcatttttattttatacatatgaaaaaacaaaacaatttacgtagtctggcagcacaggccgttgaacaggtcgtcgagcagggacaatcattaagtaatgtgctcccgccgctgcaacaaaaagtcgccgataaagacaaagcgctacttcaggagctgtgctttggcgtactgcgcaccctttcacagctggaatggctgatcaataagctgatgtctcgtccaatgaccggcaagcagcgtacagtgcattacttaattatggtcggcttttatcagttgctgtacacccgcgttcctccccatgcggcgctggctgaaaccgttgaaggcgcggtctccatcaaacgtccgcagttgaaagggttaattaacggcgtcctgcgccagttccagcgccagcaggaaacgttgcttaatgagtttgcgaccagcgatgcgcgctttttacatccaggttggctggtaaagcgtttgcaaaatgcttaccccacacagtggcaacacattattgaagcgaataaccagcgtccaccgatgtggctacgtgtaaatcgtacacaccacacccgcgacggttggcttggcttacttgaagacgcaggcatgaagggatatccccatcccgattatcccgacgctgtacgtctggaaacgccagctccggtacatgctttacccggttttgctgagggttgggtaactgtccaggatgcctctgcgcagggatgtgcggtttttctcgctcctcagaacggtgagcacattttagacttgtgcgccgcgcccggcggtaaaaccacgcatattctcgaagtggcccccgaagcagacgtgttggcagttgatattgatgaacaacgactctcccgcgtttacgacaacctaaagcgtcttgggatgaaagcgacagttaaacaaggggatggacgttatccctcccaatggtgcggcgagcagcagtttgaccgtattctgctggatgcgccctgctccgcaaccggcgtcattcgccgtcatccagatatcaaatggctgcgtcgcgatcgcgatatcgcggaactggcgcaattacaggcggaaattcttgatgccgtctggccgcgcctgaagcccggcgggacgctggtttacgccacctgttccgtactgccggaagaaaaccgcgatcagatcaaaacctttttacaacgcactcccgatgccgcgctcagcgaaacgggaacacctgatcagccaggacaacagaatctgccgggcggcgaagaaggtgatgggttcttttacgctaagctaatcaagaagtgatgagataacgggccacgactgatgaaaattatcatactgggcgcagggcaagttggcggaacactggcggaaaacctggtcggcgaaaacaacgacatcacggtggttgataccaacggcgaacggttacgcagtttgcaagataagttcgatctacgcgtagttcaggggcatggttcgcatccccgcgtgttgcgcgaagcgggcgctgacgatgcggatatgctggtcgctgtcaccagttcagatgaaactaatatggttgcctgccaggtagcctattcactcttcaacactccaaaccgtatcgcccgcattcgctccccggactatgttcgcgatgcggataaactctttcattctgaagcggttccgattgatcatctgatcgcgccggagcagttggttatcgataatatttatcgcctgatcgagtatccgggagcattacaggttgtaaactttgccgaagggaaagtcagtctggcagtagttaaagcctactatggcggtccactaataggtaacgcgctctcgacaatgcgagagcatatgccgcatatcgatacccgcgttgccgcaattttccgccatgacagaccaatccgtcctcagggctcgactatcgtggaagcaggggatgaagtcttctttattgcggcttcacagcatatccgtgcagtaatgagcgaattacagcgtctggaaaaaccctacaagcgcatcatgctggtgggcggcggcaatatcggcgccgggctggcaaggcgtctggaaaaagactatagcgttaaattgatcgaacgcgatcaacaacgcgccgcagaattggctgagaaactgcaaaacacgatcgtcttttttggcgacgcttccgatcaggaattgctggcggaggagcatattgatcaggtcgatctctttatcgcggtcactaacgatgatgaagccaatatcatgtccgcgatgttggctaagcggatgggcgccaagaaagtgatggtgttgatccaacgtcgcgcttatgtcgatcttgtgcagggtagcgttatagatattgcgatttctccgcagcaggccaccatctctgcattactgagccatgtgcgtaaagcggatatcgtcggcgtttcctcactacgtcgcggggttgccgaagccatcgaagccgtcgcgcacggcgatgaaagcacttcccgcgtggttggccgcgtcattgacgaaattaaactgccgccaggcaccattattggcgcggtggttcgcggtaatgatgtcatgatcgctaatgacaatttgcgcattgaacaaggcgatcacgtcattatgtttttgaccgataaaaagtttattaccgacgtcgaacgtctgttccagccaagtcctttcttcctctaatttaaggggcgctcattcagcgccctttttaattccctttatttatcaaggtttaatttatttcgctaaacagaagccgtaaatggaaaatgccttagcatttgttaaacttataacgtcagctgcatagggagaataaaaatgagttttattaaagaatttcgcgaattcgcgatgcgcgggaatgttgtggatttggcagtgggtgtcattattggcgcggcattcggtaagattgtttcttcactggttgccgatatcattatgccgccgttgggattgttaatcggcgggatcgactttaaacaatttgcttttacgttacgcgaagcgcagggagatattccggcggtcgtcatgcattacggcgtgtttatccagaacgtatttgattttgtgattgtggcctttgctatctttgttgccattaagcttatcaacagactcaaccgtaaaaaagcagaagagccggcagctccgccagcgccttctaaagaggaagtgttattgggcgaaatccgcgatctgctgaaagaacaaaataaccgttcttaataagcagaaggccagtggtaaaaaagtgattcactttcttgccactggcctcccagttccctcgattaccgtgtttacctttacgcagataacttcctttgcctttcttatttttttcaacgcgttgcctgaaaaggggatcgtgcagtaatgcctcgatggcattgtcctttatctgccctttcttatgttgataacgactcataatgtctcccgattgtataaattaacggcgcgagtgtagccccgccggttcaataaatcaacatcccgatttcgctccactggccccctgttccagggcttccagaatggaacaatagacgctactgtgggccgttccgcaacaagcatcattaagcctttgtaacgaacgctgcatcgtttgcagttccgcaatcctggcttcaacctcctgcaatcgctcttgcacaatactttttgactcctgacaggtatggtgctcaggatcaattcggatcgataaaagctcgcggatcgagtcgagcgtgaaacccaactgccgcgcataacgaataaacttgagacgctgcagatcgttttcggtatacagacgaaacccgccttcagtacgtacctcatgatccatcatctgttgcttttcatagtagcgaatggtatcaggcgttacgtctgccagctttgccagctcaccaatgcgatacatacaagctccgttaattatcgttgattttatgcagcagtttttctgcatactcaccgtgtaaaaagtcggtactcaacccagcctgccgaagttttagttcaagcagcgagagctggcgactaacctgatggtatcgagggtcatcttcccggatactgttgaggatatcaagtaactgaatagcatctctgcgctgctccagttcagggggaagacagcccgcattcttgagtaagcgataacccgcacgaagttccgccggcacatgagaatcatcatccagaataagcggctcgccacggccaggcaaattatcaaactcgcctttacgctgtgcctcgataatatgacgctctgcccactggtcaagtaaccacatacgtcgctccagggattgaacgaaaagaatacaattattgtagatatgtggggttcaggagggtataaaaaaacccgccgaagcgggtttttttacgttactacagattactctgcagcagcttctgttttctctgaacgatcaaccagctcgatgtatgccatcggcgcgttgtcgcctgcacggaagccacacttcagaatgcgagtgtaaccaccggcgcggctcgcgaaacgcgggcccagctcgttaaacagttttgccacgatctcgttatcacgagtacgggcgaatgccagacgacgattagcaacgctatcagtcttggcaagagtaatcagcggctcaactacgcgacgcagctctttcgctttaggcagggtcgtcttgatgatttcatgacgaaccagtgaacctgccatgttgcggaacatagcctggcgatggctgctgttgcggttcagttgacgaccactcttacgatggcgcatgaccttatccttctcagtaaaaccttaacctgtgatccggttactcgtcagcgatgcttgccggtggccagttttccaggcgcatacccagagacagtccacgggaagccagcacgtctttaatctcggtaagagattttttacccaagttaggcgtcttaagaagctcaacctcggtacgctgtaccagatcaccgatatagtggatagcttctgccttgaggcagttagcagagcggacagtcaattccagatcgtcaacagggcgcagcaggatcggatcgaattctggtttctcttctttcacttccggttgacgtacatcacgtaaatcaacgaaagcttccagttgttcagccaggatggttgccgcacgacgaatcgcctcttcaggatcgattgtgccgttggtttccatttcgatgaccagcttgtccaggtcggtacgctgttctacacgcgctgcttcaacattgtaggcaatacgctctacagggctgtagcaggcgtcgaccagcagacggccgattgggcgctcatcttcttccgaatgaattcgggtagaagccggcacataaccacgaccgcgctgaactttgatacgcatactaatagacgcgttttcatcggtcaggtggcagatcacgtgctgcggcttgacgatttcgacatccccatcatgggtgatatcggctgcagtcacagggccaatgccagatttattcaaggtaagaataacttcatctttaccctgaactctcaccgccagccctttcaggttgagcaggatttccaggatgtcttcctgaacgccttctttggtgctgtactcatgtagtacaccatcaatctcaacctcggtcaccgcgcaacccggcatcgatgagagcagaatacggcgcagtgcgttacccagagtatggccgaagccacgctctaaaggctcaagggtcaccttggcgtgcgtcgaactcacttgctcgatatctaccaggcgcggttttagaaactctgtcacagaaccctgcattgtgtcctctctttggtactaagctttacttggagtaaagctcgacgatcaggtgttcgttaatgtccgcagacagatcagaacgctcaggcttacgcttgtacgtaccttccatcttgccagcatcaacttccagccaggttggcttttcacgctgctcagccagctccagagcggctttcacgcgagactgcttcttcgctttctcacgaatgctaacaacgtcattcggactaacctgataagaagcgatgttaacaacacgaccgtttaccataattgctttatggctaaccagctgacgtgcttctgcacgagtggcgccgaagcccatacggtatacaacgttgtccagacgaccttccagcagagccaacaggttttcaccggtgttgcctttcagacgtgctgcttctttgtagtagttacggaactgacgctccagcacaccgtaaatgcggcgaactttttgcttttcacgcaactgcacaccatagtcagacagacgcggcttacgcgcaccgtgctggccaggagcttgttcaattttacacttggtatcgatcgcgcgaacgccagacttaaggaataagtcggtgccctcacgacggctcagcttgagcttaggacccaaatatcttgccattttctttctccaactaacctggaaaacgaagcgttatacgcgacgttttttcggcggacgacaaccgttatgagggatcggagtcacatcagtaatattagtgatgcggaaaccagcggcgttcagagcacgaatagtagattcgcggcctggacccggacctttaaccataacttccagattcttgataccgtattctttcacggcgtcagcgcaacgctctgctgcaacctgagctgcaaacggagtggatttgcgagaaccacggaaaccggaaccaccggctgttgcccaacccagcgcattaccctgacgatcggtaatagtcacgatggtgttgttgaaagaagcatggatatgagccacgccgtcagagacttgttttcttacacgtttacgtgcgcgaactggtgcctttgccattattcaatcaccccgattatttcttgatcggtttgcgcggacccttacgggtacgagcgttggtcttggtacgctgaccgcgaaccgggagaccacgacgatgacgcaaaccgcgatagcaaccaagatccatcaggcgcttgatgctcatgctgatttcacggcgcagatcaccttcaacgacaaatttggcaacttcgtcacgcagcgtgtcgatttgttcttcagacagctcactgatcttaacattttcagcgatacccgctgcagccaggatggctttagaacgggtcttgccgacaccgtagatcgaagttaacgcgatcacggcgtgtttctgatcaggaatgttaatgcctgctatacgggccactatgcactcctactatttaatatgtacgtaccatgctgaaaagcccgttttcaggatactcaaatggaaacgtacagacatacaaaagattggctggctaatctagccagctcaacccaactttgcaagaaaaatatgcgaaaaaatcagccttggcgctgtttatgcttcggctcggcactgcaaatcacacggatgacaccatcacgcttaacgattttgcagttacggcataatttcttgacggaagcacgaactttcatttttactctccgtaacttctcaggcgaccaattaacggccgtagcctttcaggttcgccttcttcaatgcagactcatactgactggacatcatcagagtttgcacttgagccataaagtccataatcacgacaacaacgataagcagtgaggtcccaccgaagtagaacggcactttcattgcatcacgcatgaactccgggatcaggcagataaaggtaatatacagcgcaccaaccagggtcaggcgggtcattactttatcgatatacttcgccgtttgctctcccggacgaattcctggtacaaatgcaccggacttcttcaggttatctgctgtttcacgcgggttgaaaaccaacgccgtgtagaagaaacagaagaagatgattgcagacgcatagagtaacacataaagcggttgcccaggctgcaaatacagcgaaattgttgtcagccagttccaaccagtaccgcccccgaaccatgacgcgatggtcgccgggaacagaataatactggaagcgaagattgccgggattacccccgccatattcactttcagcggtaaatgtgtgctctgtgcagcatagacacgacgaccttgctgacgtttggcgtagtttaccacaatacggcgttgaccacgttcaacgaatactacaaagaacgtcactgcaaatactaatactgcaaccaacagcaacacgaggaagtgcaggtcgccttgacgcgcttgctcgatagtatgggcaatggctggcgggagtcccgcaacgataccagcgaagatgatgattgagataccgttaccgataccgcgctcagtaatctgttcgccgagccacatcaggaacatggttcctgtaaccagactgacaacagcggtgaaatagaatgcaaagcctggattcatcaccaggccctgcataccaggcatattcggcaaaccggtagcaataccgatcgactggaatatcgccagcaccagagtaccgtaacgggtgtactggctgatcttacgacgaccagactccccttctttcttaatttctgccagcgttggatgaaccaccgtcaacagctggataatgatcgacgccgaaatatacggcatgatccccagggcaaagatagaagcacggctgagagcaccaccagagaacatgttaaacatttcaatgatggtgcctcgctgttgctcaagcagtttggcaagtacagcggcatcaataccagggatcggaataaaagagccaatacggaacacaatcagcgcgccgataacaaacagcagtctgcgtttcagctcacctaagccacctttggcactttgaaaatctaatcccggttgtttagccatctgctacttattcctcgattttaccgccagcagcttcgatagcagcacgagcgcctttagtaacacgcaggccacgaacagttaccggagtagtgacttcgccagccaggatcactttcgcgaactcgatctggataccgataatgtttgccgctttcagcgtgttcaggtctacaacgccgccttctactttcgccaggtcagacagacgaacttcggctgtaatcgctgctttgcgagaagtgaagccgaatttcggcagacgacggtacagaggcatctgaccaccctcgaaaccgcgacgtacgccaccgccagaacgagacttctgacctttgtgaccacgaccaccggttttaccgaggccagaaccgataccacgacccaggcgtttacccgcctttttggagccttcggccggagacagagtatttaaacgcatctcttactcctcaactttaaccatgaaggaaaccgcgttgaccataccacgaacagcaggagtatcctcgcgctctacggtgtgaccaatacgacgcagacccaggccaagcagcgttgccttgtgtttcggcagacgaccgattgcactgcgggtttgagtaattttaatagtctttgccatggtttatttccccagaatttcttcaacggatttaccacgcttggcagcgaccatttctggagaattcatattttccaggccatcaatagttgcacgaaccacgttgatcgggttggtggaaccgtatgctttagccagaacgttatgaaccccagcaacttccagaacggcgcgcattgcaccaccggcgatgataccggtaccttcggaagctggctgcatgaatacgcgagaccccgtgtgaacacctttaaccgggtgctgcagggtgccgttgttcagcgcgacgttaatcatattgcgacgggctttttccatcgctttctggatcgctgctggaacttcacgcgctttaccgtaaccaaaacctacgcgaccgttaccatcgcctactacagtcagagctgtgaaggagaaaatacgaccacctttaacggttttagatacgcggtttaccgcgatcagcttttcctgcagttcgccagcttgtttttcgatgtgagccatcttacacctctaccttagaactgaaggccagcttcacgggcagcatctgccagtgcctggacacgaccatgatattggaacccggaacggtcaaaggacacatctttgatgcctttttccagagcgcgttcagcgacagctttacccacagctgcagccgcgtctttgttaccggtgtacttcagttgttcagcgatagctttttctacagtagaagcagctaccagaacttcagaaccgttcggtgcaattacctgtgcgtaaatatgacgcggggtacgatgtaccaccaggcgagttgcgcccagctctttgagcttgcggcgtgcgcgggtcgcacgacggatacgagcagatttcttatccatagtgttaccttacttcttcttagcctctttggtacgcacgacttcgtcggcgtaacgaacacccttgcctttgtaaggctcaggacgacggtaggcgcgcagatctgctgcaacctggccgatcacctgcttatcagcgcctttcagcacgatttcagtttgagtcggacattcagcagtgatacctgccggcagctgatggtcaaccgggtgagagaaacctaaagacaggtttactacattccctttaaccgctgcacgataacctacaccaaccagctgcagcttcttagtgaagccttcggtaacaccgataaccattgagttcagcagggcacgcgcggtaccagcctgtgcccaaccgtctgcgtaaccatcacgcggaccgaaggtcagtgcattatctgcatgtttaacttcaacagcatcgttgagagtacgagtcagctcgccgtttttacctttgatcgtaataacctgaccgttgattttgacatcaacgccggcaggaacaacgaccggtgctttagcaacacgagacattttttcctccgattaggctacgtagcagataatttcgccaccaagaccagcctggcgcgctgcacgatcagtcataacacctttagaggtagaaacaactgcgatacccagaccggccataactttcggcagctcatctttacgtttgtagatgcgcagacctgggcggctgacacgctgaatgctttctacaacagctttaccctggaaatacttaagagtcagttccagttccggcttggtgtcgccttcaactttaaaatcttcaataaaaccttcttccttcagcacgttggcaattgccactttcagcttggaggaaggcatggtgaccgcagctttgttcgcggcctgaccgttacggatacgggtcagcatatccgcgatcggatcttgcatgctcatctgtctttactcccgtgattcaattggtgacaattaccagctagcctttttcagacccggaatttcaccgcgcatagcggcttcacggaccttaatacggctcaacccgaacttccgcaggaaagcgtgcggacgaccagtttgacggcagcggttacgctgacgtgacgggctggaatcacgcggcagagtctgcagcttaagaaccgcattccaacgatcttcgtcggttgcgttcacatcagagatgatcgctttcagttcagcgcgtttcgcgaagtatttatcagctaaagctacgcgttttacttcgcgtgctttcattgattgcttagccatttagtaaccctaccttacttgcggaacgggaagtcaaaggcagccagcagagcacggccttcttcgtcagatttcgcagtagtggtaatggtaatatccaaaccacgaacgcggtcgactttatcgtagtcgatttctgggaagatgatctgctcacggacacccatgctgtagttaccacgaccgtcgaatgacttagcggacaagccacggaagtcacggatacgaggaacagcaatagtgatcaggcgctcaaagaactcccacatgcgttcgccacgcagagttactttacagccgatcggatagccctgacggattttgaagcctgcaacagatttgcgtgctttggtgatcaacggtttttgaccggagattgctgtcaggtctgctgctgcgttatccagcagtttcttgtcagcgatcgcttcaccaacacccatgttcagggtgatcttctcgacccgagggacttgcatgacagaattgtagttaaactcagtcatgagtttgttaactacttcgtctttgtagtaatcatgcagtttcgccatcgtactactccaaattacttgatagtttcgctgttagacttgaagaaacggacttttttgccgtcttcgaatctaaagcctacacggtcagccttgccggttgccgcattgaagattgcaacgttagaaacctgaattgcagcttctttttcaacgatgccgcccggttggttcagagccggaaccggcttctggtgtttcttaaccaggttgataccttcaacaatgaccttgccggaagacaggacattcttaactttaccgcgtttacctttatctttaccggttaacacgataacttcgtcatcacgacggattttcgctgccatgattcgctccttagagtacttctggtgccagagagataattttcatgaacttctcgttacgaagttcacgagttaccggcccaaaaatacgcgtaccgataggctgctcgctgttattgtttaaaataacgcatgcattaccatcgaagcgaatgacagaaccgtccgggcgacgaacacccttcttggtgcgcaccactaccgccttcagcacatcaccttttttgaccttaccacgcggaatcgcttctttgatggtgatcttaatgatgtcgcctacgcctgcgtagcgacggtgcgagccacccagaaccttgatacacattacgcgacgtgcaccggagttgtcggcgacgttcagcatagtctgttcttggatcattttagtgctccgctaatgtcaactactactgagacccgaaaatcaggtcgttaaaaaaaccccatatcgagggcgcggcattataacaccgcaaatcagatatgggtagaaaaaataaacggcccatcgctgagccgtttattcgttgagaatgcgtactgtattacagaaccgctttctctacaacgcgaaccagagtccaggatttggtcttggacagcggacggcattcgcggatttcaaccacgtcgccgataccgcattcgttgttctcgtcatgtacgtgcattttggtcgtacgcttgatgaatttaccgtagatcgggtgtttcacaaaacgttcgatagcaacaacaatggatttctccattttgtcgctaaccacgcgaccttgcagagtacggattttatcggtcattacgcacccgccttctcagtcagtaaagtcttaacgcgtgcgacatcacgacgcacttgcttcaacaggtgagactgttgcagctggccacttgcagcctgcatacgcaggttgaactgctcacgcagcaggttcagtagctcggtgttcagctcttcaacgctcttctcacgcagctcttttgctttcattacatcaccgtcttagttacaaaggtggttttaatcggcagtttcgctgctgccagcttgaatgcttcacgggccagctcttccggtacgccgtccatttcatacaggactttacccggctgaatcaaggcaacccaatactccacgttacctttacctttacccatacgcactgccagcggcttttcagtgatcggtttgtccgggaatacacggatccagatcttaccttgacgcttaactgcacgggtcatagcacgacgtgctgcttcgatctgacgggcagtcagacgaccacggccaacagctttcaggccgaagctgccgaagctaacatccgcgcctgcagccagaccacggttgcggcctttgtgcattttacggaattttgtacgctttggttgtaacatcagcgacgctccttatttacggcctttacgctgctgctttttcggttgagcagccggtttttccggttgttcaacagcagccataccacccaggatctcgcctttgaagatccacactttaacgccgattacaccataagtggtgtgcgcttcagaggtgttgtagtcgatgtcagcacgcagagtgtgcagcggtacgcgaccttcgcggtaccattcggtacgtgcgatttccgcgccgcccagacggccgctaacttcaactttgatacctttagcgcccagacgcatggcgttctgtacagcacgcttcatcgcacgacggaacataacgcgacgttccagctgagaagtgatgctgtcagcaaccagtttagcgtccagttcaggtttacgaacttcggcgatgttgatctgtgcaggaacgccagcgatatccgctacgaccttacgcagtttttctacgtcttcaccttttttaccgataacgatacccgggcgagcggtgtgaatagtcacacggatgctcttagccggacgctcgataacgatacgagatacagacgctttagccagttccttcgtcaggtactgacgtactttaaaatcgctgtccaggttgtcagcgaattctttggtgttcgcaaaccaggtagagttccatggttttacaatacccaggcgaataccattaggatgtactttctgacccattgctagtctccagagtctcagcgatcggacacaaccacagtgatgtggctggtgcgcttcaggatgcgatctgcacgaccttttgcacgcggcataatgcgcttcatgctcgggccttcgtctacgaaaattttcgtaactttcagatcgtcaatgtcagcgccatcgttgtgttcagcgttagcaatggcagattccagaactttcttgaccagtacagccgctttcttgttggtgtaggtcagaatatccagagcctgcgacactttcttaccgcgaatcaggtcagcaacaaggcgaaccttctgagcagaagaacgagcatggcgatgtttagcgatagtttccatctcttcctcctaccttatttcttcttcgcttttttatcagcagcgtggccgcgataagtacgagtcggtgcgaattcacccagtttgtgaccgaccatttcgtcggaaacaaataccggaacgtgctgacgaccattatggacagcgatggtcaaaccgatcatgttaggaaagatcgttgaacgacgggaccaagtgcgcaggggcttcttgtctccgctttccaccgctttctctaccttcttcagcaagtgcaggtcaataaaaggacctttcttgagagaacgtggcatggcttatcctctaaaattatttgctacggcgacgtacgatgaatttatcagtacgcttgttgctgcgggtcttcttacctttggtctgaacgccccacggagttaccgggtgcttaccaaagttacgaccttcaccaccaccatgtgggtggtctactgggttcatcgcagtaccgcgaacggtaggacgaacgccacgccagcgtgcagcacctgctttacccagaacgcgcagcatatgctcagcattgccaacttcgcccagggttgcacggcagtctgcttcgactttacgcatttcaccagaacgcagacgcagggtgacataagcgccatcgcgagcaacgatctgaacgtaagtaccagcggaacgtgccagctgaccgcctttacctggtttcatttctacgttatgaacggtagaaccaaccgggatattgcgcatcggcagggtgttgcctgctttgattgcagcatcaacgccagactgaatctggtcgccagctttcaggcctttcggggccaggatgtaacggcgttcgccgtctttgtacagaaccagcgcgatgttcgcggaacggttcggatcgtactcaagacgttcaacaactgccgggataccgtctttgttgcgtttgaagtcaacaatacgataagcctgtttgtgaccaccaccgatatgacgagtggtgatacggccattgttgttacgaccaccggatttgctgtttttttcaaccagcggagcaaaaggtttgcccttgtgcagctctgggttgaccactttaacgacgtggcgacgacccggagatgtcggtttacatttaacaactgccattgtattactcctccgacttactcagcgccgccgacgaagtccagattctggccttctttcagggtgacgtaagcttttttccagtcgctacgacgaccgatacgctgtccgtgacgtttaactttccctttaacgaccagggtgttaacgacttcgacttcgacttcaaacagtttctgcacagcagctttgatttctgctttggtcgcgtctttagcaactttgagaacgatggtgttggttttttccatcgcagtagacgctttttcagaaacgtgcggtgcgcgcagcaccttcagcagacgttcttcacgaatcatgccagcatctcctcaacttgcttaacagcatcagcagtcattacgactttgtcgaaggcgatcaggctaaccgggtcgataccagtcgcatcgcgtacgtcaaccttgtgcaggttacgtgcggccaggaacaggttctcgtccagctcaccggtgatgatcagcacatcttccagagccatgtctttcagtttctgtgccagcagcttagttttcggcgcttctacagaaaacttctcgacaacgatcagacgatcctgacgtaccagttcggacaggatgcttttcagcgcgccgcggtacatcttcttgttaactttttgactgtggtcctgcggacgagcagcgaaggtcacgccaccggaacgccagatcgggctcttgatagaacctgaacgcgcacggccagtgcctttctggcgccacggttttttaccggaaccagttacttcagcacgagtcttctgagcacgagtaccctgacgagcaccagctgcataagcaacaacaacctggtgaaccagcgcttcgttgaaatcacgaccgaaggtagtttcggaaacagtcagcgcgctctgcgcgtctttcaatactaattccattgctatccccttacgccttcacagctggtttaacgatcaggtcgcaaccggttgcacccggaacaccacccttaaccagcagcaggttgcgctcagcgtcaacgcgtactacgtcaaggctctgaacggttacgcgctcattacccatctgacctgccattttcttgcctttgaacactttgcccggagtctggttctgaccgatagaacccggaacgcggtgagacaaggagttaccgtgagtagcgtcctgggtacggaagttccagcgcttaacggtaccagcgaaacctttacctttagaggtaccggttacgtcaacttttttaacgtcagcaaacagttcaacgctgatgctctgacctacggtgtattcttcgccttcagccagacggaattcccacagaccacggccagcttctacgccagctttagcaaagtgacccgcttccggcttggtgacacggttagcttttttagcacccgtagtaacctgaacagcgcggtagccatcgttagccaggtctttaacctgagtaacacggtttgcttcaacttcgattacggttactgggatagagacgccatcttcagtgaagatgcgggtcatacccacttttttaccgactaaaccaatcattgtatcaacctctcaatcgctcgatgacctgattaacccaggctgatctgcacgtctacaccggcagccaggtccagacgcatcagagcatcaacggttttctcggttggctcaacgatgtcaaccagacgcttgtgagtgcgaatttcgtactgatcgcgcgcatctttgttaacgtgcggagagatcagaacggtaaagcgctctttgcgggtcggcagcgggatcggaccgcgaacctgcgcaccagtgcgcttggcagtctcgacgatttccgcggttgattgatcgatcagacgatgatcaaacgctttcaggcggatacggattctttggttctgcatgagaccagagctccaattattttataaacgaaaatgattactcctcacacccattacgattgatgggagagtgtaaccgttcttacgtagctccccgattgggagcattgttaaatagccaaatcggctattcgaggttcaaatcgaacctgccgtcaattacgacaagcccgcgcattatacgtaaatctcagcctgacgcaagtgtcggatagaaattaagcgctttattcttatgcgagcacgattccagatggtacgcatgggatggcgacgcgcatcttttctttggaaggcatcaggcaaacctggcaatacgtcgttgtcgctgtcgcataaatctataaaggtgagcgcaagccttgacgaggatttgcttatgtttgttgccctcccctttctcattttttatgcgtcgttctctttattacttggcatatacgacgcgcgtaccggtctgctgcctgaccggtttacttgtccattgctgtggggtggtctgctttatcaccagatttgcctgccggagcgtttaccggatgcgctttggggcgctatcgccggctatggcggattcgcgttaatttactggggctatcgcctgcgttatcagaaagaggggcttggatatggcgacgtcaagtacctcgctgccttaggggcgtggcattgttgggaaacactgccgttactggttttccttgccgctatgttggcctgtggcgggtttggcgtcgcgctactggtgagaggtaaatcggcattaataaacccgctaccttttgggccatggctggcggtggcgggtttcataacaggttggaaagttttctttccagacggttaatcggtaaccttaatttgtgattgcagataattttgcataccaagtttggcaatcaaatccaactcagtttccagccagtcgatgtggccttcctcgtcggcaagaatttcaatcatcatatcccggctgacataatcatgaacgctatcggcataggctattgcctcacgtagatcttttgcgccttccagttcgagccggagatccgatcgtagcatctcttcgacatcttcaccgatgcccagcttgcccagatcctgtaggttcggtatgccttccagaaataaaatacgctcaatatacttatcagcgtgtttcatctcatcaatggattcatggtactcaacatcattaagccgggtcagcccccagtttttgaacatacgggcatgaagaaaatactgattaattgcgacaagctcatttcccaatagtttattgagataatttatgattttaacatcacctttcattttatagtccctccgcttccactctctagagcgtagatggggctacagggatgtcaaaaaaaagagtgtgactcaggcgatctctttaaattccggcatttgcgttaactcatcctgcatcacttctcgcgcggcgcgaatacacttaccacattgatttcccacaggaataaatttacgcaactgttgaaatgactgtggatgaaattgtcgtacagcctggcggatttttttatcgcttataccattacacaaacaaacgtacatgatcgctcccgttcaatttccgcacaaagtgtaaatgagaatggttatgattacaatagcacaaagcgatttacgccacgggagaagcgttaaaaagggtgaataaatataacagcggctaaatagcaggcaacaaaaagggcgccgaagcgccctcttcaattcaaaactaattaacgagtaattagcccagaactttagcaacaacgcccgcgccaacggtacggccgccttcacggattgcgaaacgcagaccgtcgtccatcgcgatcgggtggatcagggtaacaaccattttgatgttgtcgcccggcattaccatctctacgccttccggcagttcgatggtaccagtcacgtcagtagtacggaagtagaactgcggacggtagcctttgaagaacggagtatgacggccgccttcatctttggacagaatgtacacttcagattcgaacttggtgtgcggcttgatggtgcccggcttagccagtacctgaccacgttcgatttcttcacgtttgataccacgcagcagaacacctacgttctcaccggcacggccttcgtccagcagtttgcggaacatttcaacgccagtacaggtagacttctgagtctctttgataccaacgatttcaacttcttcgcccactttgatgataccgcgctctacacgaccggtaacaacggtaccacgaccggagatggagaatacgtcttcgatcggcagcaggaacggcttgtcaatcgcacgctctggttccggaatataagaatccaggaagccagccagttcgatgattttcgcttcccactctgcgtcgccttccagcgctttcagagcagaaccacgaacgatcggagtgtcgtcgcccgggaagtcgtactgagacagcagttcgcgaacttccatctcaaccagttccagcagctcttcgtcatcaaccatgtcgcatttgttcaggaacacgatgatgtacggaacgcctacctgacgacccagcaggatgtgctcacgggtctgcggcatcgggccgtcagtcgcagcaacaaccaggatcgcgccgtccatctgagcagcaccggtgatcatgtttttaacatagtcagcgtgccccgggcagtctacgtgtgcgtagtggcgggtcggggtatcgtattcaacgtgagaagtgttgatggtgataccacgcgctttttcttccggcgcgttatcgatctggtcgaatgcgcgagcggcaccgccgtaggttttagccagtacggtagtaatggcagcggtcagcgttgttttaccatggtcaacgtggccgatagtaccgacgttaacgtgcggttttgtacgttcaaatttttctttagacacggctatattccttactatagcgctctccccttcaggagagagcacgggattttggtttttaaccctgcggcttatttaccacgggcttcgattacggcctgagcaacgttgttcggcgcatcatcatacttcaggaattccatagtgtacgatgcgcgacctttggtcagagaacgcagctgagttgcatatccgaacatttcagacagcggtacttcagcgtggatcttaacgcctgtaacttcagattcctgacctttgagcataccacgacggcggctaaggtcgccgataacgtcaccggtattctcttcaggtgtttctacttcaaccttcatgatcggctcaagcagaactggttttgctttcttaaagccttctttaaaggcgatagacgcagccagtttaaacgccagctcagaggagtcaacgtcatggtaagaaccgaagtgcagacgcacaccgagatcaactaccggataaccagccagcgggccagatttcagctgctcctggatgcctttatcaacggccgggatgtattcgccaggaattacaccacctttgatgtcgttgatgaactcgtaacctttcgggttagagcccggctccagcgggtacatgtcgataacaacatgaccatactgaccgcgaccaccagactgtttcgcgtgtttaccttcgatgtcggtaactttcgcgcgaatcgcttcgcggtaagcaacctgaggtttacccacgttagcttcaacgttgaattcacgcttcatacggtcaacgatgatatccaggtgaagttcacccataccagcgatgatggtctggttagattcttcatcagtccatacgcggaatgacgggtcttctttcgccagacggcccagagccagacccattttttcctggtcagctttggttttcggttctaccgcgatggagattaccggctcagggaattccatacgttccagaatgatcgggttttccggatcacacagggtgtcaccggtagtcacgtctttcaggccgatagcagccgcgatgtcgcccgcgcgaacttctttgatctcttcacgtttgttggcgtgcatctgaacgatacgaccgaaacgctcacgtgcggttttcacggagttcagtacggtatcaccagagttaaccacaccggagtacacacggaagaaggtcaggttacccacaaacgggtcggtagcgattttgaacgccagcgcagagaacggctcgtcgtcgcttgcgtgacgctcagccggagtatctttaccgtcgtccagaataccgttgatcgcaggtacgtctaccggggatggcaggtaatcaattaccgcatccagcatcgcctgaacacctttgttcttgaatgcagaaccacaggttaccaggatgatttcgttgttcagaacgcgctgacgcagagcttgtttgatctcttcttcagtcagttcttcaccacccaggtatttttccatcagctcttcagaagcttctgcggcggactcgatcaggttctggtgccattcgttagccaggtcctgcatgtcagccgggatatcttcgtattcgaaggtaacgccctggtcggcatcgttccagttgatggctttcattttcaccaggtcaacaacgccggtgaaaccttcttcagcaccaattgccagctgcagcggaaccgggttcgcgcccagacgggttttgatctgaccaacaactttcaggaagttcgcgcccatgcggtccattttgttaacgaacgcaatacgcggaactttgtatttgtttgcctgacgccatacggtttcagactgcggctgaacaccaccaactgcgcagtaaaccattaccgcaccatcgagaacacgcatggaacgttctacttcgatagtgaagtcaacgtgccccggggtgtcgatgatgttgatgcgatgcggttcatactgcttagccataccagaccagaatgcagtagtcgctgcggaggtgatagtaataccacgctcctgctcctgctccatccagtccatggtagctgcgccgtcatgaacttcaccgattttgtggtttacaccggtgtagaacagaatacgttcggtagtagtggttttaccggcgtcgatgtgcgcactgataccgatattacggtagcgtgcgatgggtgttgtacgagccatttgattcctcgttgatatctttaggcgttcagttaagttatccaaaacgggcgacttacctgaagcgcccgcctggtgactatgactccgaagggattaccaacggtagtgtgcgaacgccttgttggcttctgccatacggtgaacgtcttcacgtttcttaactgcagtacctttgttgtctgcagcatcagaaagttcgttcgccaggcgcagagccatggatttatcaccgcgtttacgagcagcttctacgatccaacgcattgccagagcattacgacggaccggacggacttcaactggtacctgataagtagaaccacctacacggcgggatttaacttctacagtcgggcgaacgttttcgagagcgacttcgaaagcttccagttcagatttaccagaacgctgagccagggtctccagcgcgctgtatacgattgattctgcagtagattttttaccatctaccatcaggatattgacaaatttagccagcagttctgatccgaacttcggatccggcagaattttacgctgaccaatgacgcgacgacgtggcatggaaatactccgttgttaattcaggattgtccaaaactctacgagtttagtttgacattaatttaaaacgtttggccttacttaacggagaaccattaagccttaggacgcttcacgccgtacttagaacgagcttgcttacggtctttaacgccggagcagtcaagcgcgccacgaacggtgtggtaacgaacacccgggaggtctttaacacgaccgccacggatcaggatcacggagtgctcctgcaggttgtgaccttcaccaccgatgtaggaagtcacttcaaaaccgttagtcagacgaacacggcaaactttacgcagtgcggagttcggttttttaggagtggtagtatatacacgagtacatacgccacgtttttgcgggcatgcttccagcgcaggcacgttgcttttcgcaactttgcgagcacgtggtttgcgtaccagctggttaactgttgccattaaatagctcctggttttagcttttgcttcgtaaacacgtaataaaacgccctcacacaatatgaggacgccgaattttagggcggtgtcgaaaaggtgtcaagaaatatacaacgatcccgccatcaccaggccatctggttggcatacttaaccgtgagtctgacaaactcagtatagtcaaccctgacgacactgtctgaaatttgaccacccaggccgcgggcgtcaatgtcttctttcaaggcatagaccgttatgggggcatcgcgcagactttcaaggaagcggttaccttcaatcgcgacggtaacgccatcctggagcagcaaaagcgcatcgccctcttttagcaggcgcagcaaagcgggaaaatcaacgctcgaagcgcaatgaggtaaggtatgcagcataaacgcctcagaatctcaggatgacatcatagttgccaagctcgcggcgtaacgccacgggttccagcggcgtggcgtctaccacaaaattaatgttctccagaccacgctcgcgcagcgatgccgcgcagatccagcattgatcaatatcgtacaaatcaaagagcttgaaagtagcaatatagtcacgcgccagtacagcgtctggtttttgtccgggtaataactgaaagacgccgtcgctgataaaaaagacgcccagcgcttccgttagcgctgacgtcgccagcagcgcatccagcccttcacgacctgaggcgctgccgtgcggcgcggtggaaaagacaaatgcaatacgtttcattaaaactgcaccacccgatcgcaggtgagagatgcctccgccagcgcgcccaggccgcttagcgtaaagcccggctgaagattggcggacggcaacgccaatctgccggcttcagtttcatcaataataccgcgacgaagcgccgccgcgacacagatgttcagcgctacgccatgctgcgtattcaatttctgccaggcgcgtaccagatcatattcatcgctcgccggcgaggtcaggagattggcgttatagacaccttcccgatagaaaaagacgctggctaactcatgcccctcattgagcagcgcgtgggcgaactgcaatgcgctgctggcctgctgggtgccatatgccggcccggtgaccataatggcataacgcattatttatcctgcccctgaaagtcgccgcttttgaactggcgaatatagaggtaaaccgtgtgttttgagatattcagacgatcggctacctggttaatggcgtctttaatatcgaaaatgcctttttcgtacaggttaaggacgatctgacgatttttcgcattgttagaaacattacgatcggcattcacttcttcgatcgtgaactccagcgtctgggtgactaaatcttcgactgaggaggcaaaattaaccgctgagccgacttccggcgtttccggcggaataaaggtattcataatctgtgaaaatggcacatcgagattcatgttgatgcacagtagaccaatgacgcgctgctcgcggttgcgaatggcaatcgtcaacgacttcatcaagacaccgcttttcgcgcgcgtgaaatagcatttcgacacgctactgtccgcccctgtcatgtcgtgcaacatacgcaacgccaggtcggtaatcggcgagccaattttacggcccgtatgttcgccattggcaatacgaatggctgaacattttagatcctgcaaagagtgcaatacgatttcacaatgggaacctataagcatcgctaacccgtccactaccgcttcgtaggatttcagaatatcgaagtcggtttgctcgaagggacgctgatccagcaaatcaagttcactggtttcgttggttaaaagcgacctggacatgaaaaaaaacactccttttcaggagcctgtcgttatgttttcagggcaggctcattatttacgcggatgattaaattaatacagtgagggttcatctttccagtactaatttgctcgtctatttcagactacgtgtgcgttggcggtcattcagcctacggtctcgcccttaacgaccagcgcaagcgccgttatccgcaaatcaaattatggtgagtaatatatccggcctgaataaaaaaaaccgccgctattacaagcggcggctctcagtttttattttttagcagcatctgcggctttagcgtcagccgcatcggcaggtttagcatccgctttcggcgctggtttgatatccagcagctctacgtcgaataccagggttgagtttgccgggatccccggaacgcccgttttaccgtaggccagctcaggtgggataaccagcttgatcttgccgcctttcttaatatttttcagaccttcagtccagccagggataacgccgtccagacggaaggagagcggttcgccgcgcgtgtaagagttatcaaactctttaccgtcgatcagagtacctttgtagttcaccacaacggtatcgctatctttcggcgcctcgcctgtgccttctttctctactttgtaaagcaggccggtagaggaggttttcacacctttctctttagcaaaagcgtcgcggaacgttttaccttttgcttcgttatcggcagcgtctttttccatcttcgcctgagcagcgctcttcacgcgtgcttcaaacgtctgcagcgtttgctcaatttcctgatcggacagtttgctcttatcggcaaaggcatcctgaacgccggcaatcaactgatctttatccagtttgatgcctaacttttcctgctctttaagcgaattttccatgtaacgacccagcgaggcgcccagcgcataagccgctttttgatcgtcgtttttaaatgctgctttgctatcagcggtagctgccggtttcgccgcatcagcagcaaaagtgatcggtgcgtgcatagcaacggccatcgtagttgccagcagcgtggctttaaacagtgatttcatccatatctccagggccggggcatctcgccccatgttaacttacgtaagaagcgtactataaatcgttgcagaacaaatcaacatacgaacacgccctattatcacttcttttcagactctttttgtttaaattagtttcgtagtgcgcgtaatggttgctgtgaaagccggtaaagttaagtagaatccgccgacggagacaacataaagaggtacatcatgcaggatatcacgatggaagctcgtctggctgaactggaaagccgtctggcgttccaggagattaccatagaagaactaaacctgacggtaaccgcacatgaaatggagatggcgaagctgcgcgatcatctgcgtttgctcacggaaaagttaaaagccagtcagccgtcaaatatcgcctctcaggcagaagaaacgccgccgccgcattattgagacgaaaaaaagcggggttaacccgctttttttgtgcccgatgatttatcgaaccaatgataataccctaaggatttcgagtcacagcaaggctgcaagcttgaaaattccccgggagcatagataactatatgaccggggtttgaaagcgtagccaacaccgcggtggcttgaaagacgacggggattaatggcagccgcagccgcctttaccaccaccgccgcagcagccttcgccgccgtgctcgtgaccatggtcatgaccatgaccgccacagcagccgtcttcaccgtgatcgtggtggtgatcgtgcgcgccatgaacatgaccgtgagccagttcttcttcagtcgcttcacgaatcgcaacaacttctacgttaaatttcagattctggcccgccagcatgtggttaccatcaaccacaacgtgatcgtcttccacttcggtaatctctaccggtaccgggccctggtcggtttccgccaggaaacgcatccctacctgcagttcatcaacgcccataaagacgtctttaggcacacgctgcaccagattttcgtcatactggccgtaagcgtcgttcgcgccaacagcgacatcaaatttgtcgccaacttcatggccttccagcgcggtttccagaccagagatcagggagccgtgaccgtgcaggtaatccagcggcgcactcaccggagactcatcaaccaacacaccgtcttctgtacgtacctgataggccaggctgaccaccaggtcttttgctactttcatgatatctcctgagcatgggaagaatagtggcgcagattgtagcggaattctgcagccgtgtaccccttagcttaaaaaaacctgcggcatatcgctagtccggatgaaaaatcccgatcacttgctcttctttgcgaacatgctcgcggacgtctttatccgcttcccgcatttgatgcccgcacttaacgcattcaacaatatcgacattattttcacgccacatcgccattgtatcctgcgcctgacaggccggacatttcgcgcctgcaataaaacgtttacggattgccattgttttacccctactcaaattcatcccagccatccaactggcgccgttcctgttgcatttcccgctgaaaaatctcctccagttcgcgtcgggcctctctggcgcgcgaaatctgtaccatgtcgctatgctccgggatcagttcccgcaacattcgcatatccagccgacgaaaatgcaactgcgcgcgttgcgcctgatgcggatgcatacctaacgacaccagagttttacgtcccagttccagcgcgctggaaaacgtttcacgggaaaactgcgtgacgccagcctgtaataactcatgggcctccacacgtccacgcgctcgcgcaagaatatgcagatgaggaaaatgctgctgacacagcgccaccagcttcatcgtgtcttccggttcattacacgtgatgactatcgactccgccgcttccgcgcccgcagaacgcagcagctcgacttgtgtagcgtcgccgtaatacactttataaccatatttgcgcatcagattaacggcgccgatatcgcgttccagcacggtgatacgcatcttattcgccatcaataagcgagcgatcacctgaccaaaacggccaaagccgacgacaatcacctggggcttatcatcctcaacccacggcttttcatcattctcttccgggccattaaggcggcgcgataaccacttatcaatccctttcatcagtagcggcgtggtcatcattgataatgtgacagtcaccaataataacgccatctgatcgccctgaaacaggcgctgagaagaggcggtagaaaagagcacaaaagcgaactcgcccccctgactcagcacgctggcaaactgcatccgttcagaacttcttattccatatagccgcgccagcagatacagcgtcaacatttttatgacgaccagaataacaacgctcgccgccacccacagtaaatgggtataaagtacgccgagatttagcgacataccgacggagataaagaacagcccaagcagtaaacctttaaagggatcgatagcattttccagctcatgccggtattcgctctctgccagtaaaacgccggcaatgaaggttcccagggccatcgacagtcccagcgcatccataaataaggcggcgctcaacaccagcaacagcgtcgcggcagtgaagacctcccgcacgccagacgcagcaataaaacgaaataccgggcgcagcaggtaacgaccgccaatcagcattaccgcgaaagccagtaccttcattgccactttaaaccagtcgaaatgctcgtcggccgatcccgccaataaaggcaccaacgccagtgcggggatcaccgctaaatcctgaaacagtaagacggaaaaccctaactgcccggactcgctacgattcatgcctttctcgcgcatcagttgtagcgccatcgccgtcgaagacatcgccaggccaatcccgccgacgaccgccgcctgccataagaaatcagcaagcatcaataatcccgccagcaccgccgcgcttaacagcacctgagcagcgccgacgccgaagatagagcgccgcagttgccaaagccgggacggattgagttcgagaccaatgataaacatcagaaacacgacgcccagttcggaaaagtgcaggatctcgtcaacgtcgctgataaatcccagcccccacggaccgatggcgattcccgccagcaaataccctagcaccgcgccgatgcccagcctggcggctaacggcaccgccgctaccgctgcgaagaggaacaacactcccgcggtcaataaatcagcaccttccatcaatagcctcccgcgctcacaggattcgccagccactcgccataggctttcgcatgactggccagcgtctgcggcgactggcggcgcgcccagtacacaataatgggcggcatccagtgcatccggcacatggccgcggtcagttcaaaagggcggagtacatcgctcattggatagcggtttagcgcgtcataccggtaagcgctctccggctcgccggtcgtaatcacgctacgccagtactttcccaccagttggtttccccctggtccgctggcgaacccccgactcaaaacgcgatcaagccattctttcagtaaagccggacagctataggtgtaaaggggatgctgaaaaacaatgacgtcgtgctcacgtaacagggcttgttcatagggcgtgtcgataaaaaaatcaggatagcgcgcataaagatcgtgcacggttacgttattgtgctgtatggccggtttaagcagtacccggttagcaaccgagtcctgagattccggatgggcatacaacagcaagactttcgctggctgagacatcaatccccctcccggttgttttgggtcgatacatgccattcttcaggccgcttctacgttgacagcgtttgttcaactcaggaacgtactctatgtccgccgctggggattaatgagagatattcttgtccctcaccaaaggcggcctgaatgattttgtgtatcgttgttgttttgagctaccattgcgctccagcgcggcggtacgcccgaatattacattatcataatgataaattaacatagtctgaacatactgcgccttatgattgttttctcctcgttacaaattcgtcgcggcgtgcgcgtcctactggacaatgcctcggctaccattaatccaggccagaaagtcggcctggtgggtaaaaacggctgcggtaaatctaccctgctggcattgctaaaaaatgaaatcagcgccgatgccgggagttttaccctgcccggaacctggcaattagcgtgggtgaatcaggaaacacctgcgttgcctcagccagcgattgagtatgtcattgacggcgaccgtgaataccggcagctggaggcgcagcttaacgacgccaacgaacgtaacgacggacatgctatcgcctccatacatggcaagctggacgccatcgacgcatggaccgttcgttcgcgcgccgccagcctgctacacggtctcggcttctctaacgatcagctggaacgtccggtcagcgacttttccggcggctggcggatgcgccttaacctggcccaggcgctgatttgccgttccgatttactgctgctcgacgaaccgaccaaccacctcgatctggatgccgtcatctggctggaaaaatggctgaagagctatccgggcaccctgattctgatctcccacgatcgcgactttcttgacccgatagtggataaaattatccatatcgaacaacagactctgttcgagtacaccggcaactacagcgcgtttgaagttcagcgcgccacgcgcctggcgcaacagcaggcgatgtatgagagtcagcaggagcgtgtggcgcatctgcaaagctacatcgaccgtttccgcgctaaagcgaccaaggccaagcaggcgcaaagccgtatcaagatgctggagcgtatggagctgattgcgccggctcatgtcgacaacccgttccatttcagcttccgcgcgccggaaagcctgccgaacccgctgctgaagatggaaaaagtcagcgcaggttatggcgatcgcatcattctggaatccatcaagctgaacctggtgcccggctcgcgtatcggcctgctgggtcgcaacggcgcggggaaatcgacgctgatcaagctgctggcgggcgaactggaaccgttgcacggtgaaatcggcctcgccaaaggcattaagctcggctacttcgcccagcaccaactggagttcctgcgcgccgatgaatccccgctgcaacatatggcgcgtctggcgccgcaggaactggagcagaagctgcgcgactatctcggcggcttcggtttccagggcgacaaagtaacggaagagacgcaacgtttctccggcggcgagaaagcgcgcctggtactggcgctgatcgtctggcagcgtccaaatctgctgttgctcgatgaaccgaccaaccacctggatctcgacatgcgtcaggcgctcaccgaagcgctgattgatttcgaaggcgcattggtcgtcgtgtcgcacgaccgccacctgattcgctccaccactgacgacctctatctggttcacgacaaaaaggtcgaaccgttcgacggagacctggaagattatcagcaatggctgagcgacgtgcagaaacaggaaaaccaggccgacaacgcgccgaaggaaaacaacgccaacagcgctcagtcacgcaaagatcagaagcgtcgcgaagccgagctacgcactctgacgcaaccgctgcgtaaagagattacccgtctggaaaaagagatggaaaagctcaacgcccaactggcgcaggcggaagagaagcttggcgacagcagcctgtatgacccaagccgtaaagcggagatgaccgagtgtctgcaactgcaggccagcgccaaatccgggctggaagcgtgtgaaatggcatggcttgaggcgcaggagcagcttgagcagatgatgcagaacgactaagagcctatcccattaggctattttattcgccattttagggccgggcagtgctcgaaatcctcacgtactatgtgtacgctccggtttctgcgcgctgtccggccccaaactggcttcaacaattacgcctacggggataggctctaacgcacggggcggacgatgaacctgtctatcaccgatgacattaccttccgcaagctcaccatcttaatgatgcttgtggagaagggcaacatcgcccgtaccgccgaggcgctaaacacgctggaagagaacgttcgtggtccgctgttcgtccataaaggcctcttaggtactcgccccggtataaagattaccgttgcggtcagcagcaccggaacagaagcctgcgttatgtgatttagcggcaaaggttgccgtgatttattttcgtcagcgcgtcgttcacgccaaataatgtaaacgtcacctcatcaacgccaagatttttcagacgcgcagtgtgttttttaatataagcctgcgccgtttcttcggattcaaacaagtaaataccgccagcttgctggtttttctcgctttctgtccagattttccagatgaagcccggctcctcattgatagactccgccagcccgaccagttgctgagtcatctcctcgccaaaagggccgctaaagttaaaatggatctgtaaaagtgtcttcgacatgccttctccttgagtcgcataactatcgtgttgccacactaccacgattaattcggctgatgcagaggttcacgcgatttctgtggggtattgcgcgcgccttgcatactgccctctctggtgaaatgaggcgcaattttatttcgccagacgaccaattgaacgtaaaatcacatattgactaatctgtgaaccttatgcgcggtatagtattgtttccaattatcaattgttctggtgctatggttgagatcacgtccacagaaatgaccccgcctgtcaataactcgcatgaatttattcccatgcgtggcattcgtaatcgccatttacaaactatgctgccgcgtttaatccgccgcaaagtgaagttcaacgcccactggcagcggctggagctaccggacggcgattttgtcgatctggcatggagcgaagatccgcaacaggcaaagtataaaccgcggctggtggtctttcacggtctggaaggcagcctgaacagcccctatgcccacgggctgattgaggcggcgcaaaagcgcggctggctaggcgtggtgatgcactttcgcggctgtagcggcgagcccaaccgtctgaatcgtatttaccactccggtgaaacggaggatggagcctggtttttacgctggctacagcgggagttcggcgccgttccgacagccgccgtgggctattcgctcggcggtaatatgctggcgtgcctgctggcgaaagaaggccgcgatattcccatcgaggcggcggtaattgtttctgcacctttcgttctcgaagcctgtagctaccacatggacaaagggttttcccgcgtctatcagcgttatttgcttaatctgttaaaagcgaatgcgtcacgcaagctggcggcgtaccccgggtcgctgccggtgaatctggcgcaactgaaatcaatgcgccgtattcgcgagtttgacgacctgatcaccgcgaaaattcacggctttgccgacgccatcgactactatcgtcagtgtagcgccatgccgttgcttaaccagattgctaaaccgacgctgattattcacgctaaagacgatccgtttatggatcatcatgtgatccctaaagcggaagatctgcccccgcaggtggagtatcagctgactgagcatggcggacacgtaggatttatcggcggtacgccgttgcgccctgaaatgtggctggaacgccgaattcctgactggctgacaacgtacctggaggcgtcatcatgatcattccctggcaggggctcgcccccgacacgctggacaacctgatcgaaagctttgtgttgcgcgaaggcaccgattatggtgaacatgaacgttcgcttgaacaaaaagtcgctgacgtaaaacgccaactgcaatccggcgaggccgtgctggtatggtctgaattacatgaaacggtcaatattatgccgaaaaagcagtttcgcgaataaaacgcctttgccgacaatacattattactaaagctcaatcatggagttgccatgtcagccaaacatccggtgatagcagtaacagggtcaagcggcgcggggaccaccaccaccagcctcgcgtttcgtaaaattttcgcgcagttaaatctgcacgccgccgaggtggaaggcgacagttttcatcgttacacccgcccggaaatggatatggcgatccgcaaagcgcgtgacgccgggcggcatatcagctatttcgggcctgaagccaatgacttcagcctactggaacatacctttattgagtacgggcagacgggtaaaggccagtcgcgtaaatatctgcatacctatgatgaagccgtaccgtggaatcaggttcccggcacgtttacgccctggcagccgctacccgaaccgaccgatgtgctgttttatgaaggactgcacggcggcgtcgtcaccccgcaacatgatgtcgcgcgtcatgttgatctgttggttggcgtggtgcctatcgtcaacctcgagtggattcagaaactgattcgcgacaccagcgagcgcggacactcccgtgaagcggtgatggattccgtggtgcgttccatggacgactacatcaattacattacgccgcaattctcgcgtacccatatcaacttccagcgcgtaccgaccgtcgacacgtccaatccgttcgccgcaaagggtattccctcgctggatgagagttttgtggtgatccatttccgcaatctggaagggatcgattttccctggctcctggcgatgctccagggctcgttcatttctcacattaatacattagtggtgccgggcggcaaaatggggctggcgatggagctgattatgttgccgctggtgcagcgattaatggaaggcaaaaaaatcgaataaccgcggtgaaatgcccgatggcgctacgcttatcgggcctacgagataaaaacgggtaggccggataaagccacgccgccatccggcatcacatgttacgccgcaatcacttcatacgaatgggtaatattgaccgctttttccagcattagcgccaccgagcaatatttttccgcggagagatcgacagcgcgcgcgacggcagcctctttcagatcgctgccggtaacgataaaatgcagattaatgtgcgtaaacaggcgcggcgcgtcttcccggcgctcggatgtcagcttcacttcgcagttggtgacattctgacggcccttttgcaggattgataccacatcaatagcgctacatccgccagccgccattaataccatctccatcggactcggcgctttgtcaccggagttgccatccattaaaatctggtggccggaggaggactctccgaggaacgtgagcccttcaacccactttacacgcgcttgcatatttcgtaactccaatgtttcaattttcctgaaagattacgcgcatacaacaaaagtcgcaatggaaggcgacctgggtcatgctgaagcgagacaccaggagacacacggcgaaagctatgctaaaacagacaagatgctacagtaatacattgacgtactgcatgtatgcagaggacatcacattacaggctacaatctattttcgtagcccccttcccaggtagcgggaagtatatttttgcaaccccagagacagtgccgttttctggctctggagacagcttataacagaggataaccgcgcatggtgcttggcaaaccgcaaacagacccgactcttgaatggttcttgtctcattgccacattcataagtacccgtcaaagagcacgctgattcaccagggtgaaaaagcagaaacgctgtactacatcgttaaaggctccgtggcagtgctgatcaaagatgaagaagggaaagaaatgatcctttcttatctgaatcagggtgattttattggtgaactgggcctgtttgaagaaggccaggaacgcagcgcctgggtacgtgcgaaaaccgcatgtgaggtcgctgaaatttcctacaaaaaatttcgccaattaatccaggtcaacccggatattctgatgcgcctctcttcccagatggctcgtcgcttacaagtcacctctgaaaaagtaggtaacctcgccttccttgacgtcaccgggcgtatcgctcagacgctgctgaatctggcgaaacagcccgatgccatgacgcacccggatgggatgcagatcaaaatcactcgtcaggaaatcggccagatcgtcggctgctcccgcgaaaccgttggtcgtattttgaaaatgctggaagatcaaaacctgatctccgcgcatggcaagaccatcgtcgtctacggcacccgttaattccgtcagaatggcgcgttttatcatgcgccatttttgtttgcatcgatgtggcgaagactgatttatcacccagagattaattacgcactacggcaaacgctggtgctgtgcctgcctgtggctgttggtttattaataggccagctacacctgggcttgcttttctctctcgttcccgcctgctgcaacattgcaggtctggataccccgcacaaacgcttttttaaacgcctgatcatcggcgcgtcgctgttcgccggatgcagtctggtaacgcaacttctgctggcggaatccatccccctgccgttgatcctgaccggcctcacgctggtgcttggcgtgacggcggaaattagcccgcttcacgcgcggctactgccagcatcgctgattgccgccatctttaccctgagccttgcgggatacatgcccgtctgggagccgctgctcatttatgcgctgggcacgctatggtacggcgtgtttaactggttttggttctggctatggcgcgaacagccgctgcgcgagtcattgagtttgttataccgtgaactggccgattattgcgaagcgaaatacagcctgctcacccaacatatcgatccggaaaaagcgctgcctcccctgctgatacgccagcaaaaagcggtcgatctcattacccagtgttaccaacagatgcatatgctttcggcgcacaacaataatgattacaagcgtctactacgggcttttcaggaagcgatggatttgcaggagcacatctccgtcagcttgcatcagccggaagaggtacagaaactggtagaacgcagccatgcggaagaggtgattcgctggaatgcgcaaacggtcgccgcccgtctgcgcgtgctggcggatgacattctttatcatcgtctgccgacgcgcttctccatggaaaaacagattggcgctctggagaagatcgccaatcagcatcctgaaaatccggtaggccagttctgctattggcacttcagtcgaatcgcccgtgtgctgcgtactcagcgaccgctgtacgcccgcgacctgatggccgataaacagcgtcgtttgccgctacttccggcgctgaaaaattatatgtctcttaaatcgccggcgctacgcaacgccggacgcatcagcgtgatgatgagcatcgccagtctgatgggcagtgcgttgcacctgcctaaaccgtactggatactcatgacggtgctgtttgtcacccaaaacggctatggcgcgacgcgcgtacgtattctgcaccgttcggtcggaacgctggtcggcctggtgattgccggcgtcacgctgcacttacatattcccgaaagcattacgctggcggtcatgctggtactaacgctggcaagttatctgattattcgtaaaaactacggctgggcgacggtcggctttacggtgacggcggtatacaccatccagttactgacgttaaacggagagcagtttattgtgccgaggctgatcgatacgctgattggctgtttaattgcctttggcggcatggtctggctgtggccgcaatggcaaagcgggctattacgtaaaaacgcccatgatgcgctggaagccgatcaagaagctatccgactgatcctcagtaacgatccgcaggccaccccgctcgcttatcaaagaatgcgggtcaaccaggcgcataacacgttattcaactcgttaaatcaggcaatgcaggaacccggattcaatacccactatctgtcggatatgaaactatgggtcacgcacagccagtttattgtcgagcatatcaacgctatgacgacgctggcgcgggaacacaccatgctgacgccggatctggcgcagcgctatctggaatcttgcgagattgctattcagcgctgccagcagcgcctggagtacgacaggccaggcggctccggcgatgtcaatattctggagtcgccggacatgccgtcacatggcttattgagcactctggaacaacatttacagcgcatcatcggccatctgaacaccatgcacaccatttcgtcgatggcctggcgtcagcgtccgcatcacggtatctggctgagtaagcggctacgggatacaaaaggttaagaccgaccgccggatgcgctacgcttatccggcaatccgccatcaggccaccaccttccctaccgcctgcgcaaagcgctgcattccttcatggatatccgcctcttccaccaccagcgacggggcaaaacgcatcacgtcggctccggcattgagcaccatcacgccggcctccgcgcctgcgtacagaaaatcgcgcgcccgacctttgtacttcggcttcagttccgcgccaatcagcagccccatgccgcgaatatcgctgaaaatgtcaaattgctcgtcaatcgcctgcaaatgttgcacaaactgttgccgcttagtgtgaatgccttgtagtacctctggcgtattaataatatcgaatgccgcgccagccaccgcacaggccagcggattgccgccataggttgaaccatgcgaacctacatggaaggccgaggctatttcctgcgtggtcagcatggcgctcaccggaaaaccgccgcctaacgctttggcgctggtgaggatatccggcgtgacgccgtagtgcatataggcaaacaggtctccggtgcgccccatcccacactgcacttcatcaaacaccagcaacgcctgatgctcgtcacacaggtcgcgtaaccctttgaggaattccggtgtagccgcctgcacgccgccttcaccctgaatcggctcgaccaccaccgcgcaggtgtggtcatccattaccgctttcaccgcatgaagatcgttgaggggaacgtgaataatatcggcgggtttcggcccaaagccgtcggaatatttcggctgcccgcctacagagacggtaaacaaggaacggccatgaaaagcgttatggaaggcaatgattttcgttttgaacgggctatggcgcacgcaggcataatgacgcgccagtttaaaagcggtttcgttcgcttcggtgccggaattcataaacagcacgcgctcggcaaacgtggcgtcgatcagtttacgtcccagacgcaacgctggttcattggtaaaaacgttactggtatgccacaaggtttccccctgggatttcagcgcctcgaccagcgccggatggcaatggcccagcgcagtcactgcaatcccgccggcgaaatcaatatactctttgccctgctgatcccatactcggctgcctttacctttgaccggaataaagtccgccggtgcataaacaggcagaatcacctcatcaaaagttgcgcgcgtaatagccgtttgttcagttgccatatcattaccacccggttaagtagaaatgccagtgaaattataatcacaaaatatgaataaaaaatcactcaatagcaaccacaaatcaacgccggaggaaatttttcagcagagcgtgtccttgttcgctgagaatactttccgggtggaactgcacgccttccagatcccactcgcggtggcgaatgcccataatctcctgcgtttcgctccaggcggtgatctcaaaacactcaggcaacgtggcagggtcgacaatcagcgagtggtaacgtgtcacggttaacgggctgggcaatccccgaaacacgccctgtccattatgcgtaacaggtgacgttttaccgtgcatcactttcgctgcccgcactaccgacgcaccaaaggcctgcgccatcgcctgatgacccaggcaaacgcccagcatcggaatacgtccggcataatggcggatgaccgccagtgaaatgccagcgtcattcggcgtacaggggccaggagagataacgattttttgcgggttcaaagcgtcaatgtgcgccagcgttagcgcatcattgcgccggacctgcacttccgcgcccagttcacaaaaatactggtagaggttccaggtaaaggaatcatagttatcgataagcaggatcatggcggctccgggtgagtagaaccgcactattttactcagtttcgcgagcttcgcttatcgctttctgaaaaatcgcccgcaaagcggagagatcgcccatcgcgccgctctggttcgcctgcttccatgtttcaaccgcaataccttgccaactcagcgcgtagcctgcatgtagcgccagttgttcaaagaagatgcgctgcgccaacccgctcccaaaacgaaacggatgaagcacattaatttcacagtagtaatgcgccagccgctcgacaaacttctcgtgcgccagaccaaccaggtagccctcttcttccagatcctgcatcagagcgttgccctctttttcgatataggcaaagtggcaaaaacgggtatcgccctggtaaatatcgacctcccgcagttgccctgcccagtcgaaaatatcctgatagagctggcgatgaatcgcgcacagatgaggcaagccgcgtaccagcggccccagttcaatcgtagcggcgcggagcgcggtcatttcgtatgccgcttgcgccagtcgctgggcctgatgaatccccagccgattacgcatcacattcagccccggatagaggtacggatcgcgtccttcgccaaatttatcgctcatagtgcctccgaagctcgtcaagacgtaccagcgcttcgtcggcagtcagggttactaaggggatctcaataccttcgagacggcggctttgctggaagttaacgttgcgccgttgctcccaaaagcgtgacttttgtttatcggtaagtttcttcacctggcctccctgaatatgcctgtgcttgaccacaagtataagcagcaatttcaggttacgctgagacagggagaaaacgcgggcggctcgcacccgcgcaggcatgttttatggcaggactttcgcggaaaggataacgactggttttgtcggcacattctgataaggcccgacatcgtgcgtcggtacctgtgagattttatcggcgacatccataccttttaccactttaccaaataccgcatagccaaagtcgcgctggccgtggtcgagaaaagcgttatccgcgacgttaataaagaactggctggtggcgctgtctttatctgcggtgcgcgccatcgcgatcgtgccgcgagtattacgcagaccgttgtcggcttcattcttaataggcggattcggtttcttctgctgcatctgctcgttaaaaccaccaccctgaatcataaagccaggaataacgcggtgaaacgtagtgttgttatagaaaccactgttgacgtaatcgacaaagtttttcacagaaaccggcgctttctggctgttcagctccagctcaatattcccggcggaggtggttaacagcacatgaggatcgccttttgctgccaacgctgcgggagaaagagcagaaagagcgaaaacagctgcgacagccgccagagtcgatttgagcatgagatttccttaaagagagcagaaataaagcaagtggaatgattttaaagagccttcctgggccaggccagccctttacctaattttacgtatatgaaacaaatgtaacgttacgacgcaacgccgtattcttgcaatatgatgtgacaaacatcacattaaaaaatgcaatgaacattactatcactaataattatttaaatgcatcacaaaagcgcctaaaatctgcccgcttaacgcgccctccacgcgcttcacttctcttcaaggccagacatgactaacagcaaccgcatcaagctcacatggatcagctttctttcctacgccctgaccggggcgctggtgattgtcaccgggatggtgatgggaaatatcgcagactattttcatctgcccgtttccagcatgagtaacacctttacttttctgaacgccgggattttgatctcgatcttcctcaatgcgtggctgatggaaatcatcccgctgaaaacacagctacgctttggttttatcctgatggtgctggcggtggccgggctgatgttcggccatagcctggcgttgttctcagcggcgatgtttgtgctggggctggtcagcgggatcaccatgtcgattggcaccttcctgattacgcaactttatgaagggcgtcagcgcggttcccgactgctgtttaccgactccttcttcagcatggcggggatgatttttcctatggtcgccgccttcctgctggcgcgtagtattgagtggtactgggtctacgcctgcatcggcctggtctacctggcgattttcatcctgaccttcggctgtgaatttccggcgctgggtaaacatgcgcagcactctcaggcgcctgtcgtcaaagaaaaatggggcattggcgtactgtttctggccgtcgccgcgctgtgctatatcctcggtcaattaggctttatctcctgggtgccggaatacgccaaaggcctcggcatgagcctgaatgacgccggggcgctggtgagtgatttctggatgtcctatatgtttggcatgtgggcgttcagctttatcctgcgctttttcgatctgcaacgcattctgaccgtactggcgggtatggcggcggtactgatgtatctgtttattaccggcacgcaggcgcatatgccgtggtttattctgacgctgggcttcttctccagcgccatttatacctccatcattacgctgggatcgcagcaaacgaaagtggcctcgcctaagctggttaacttcattctgacctgcggcaccatcggaacaatgctgaccttcgtcgtcaccggcccgattgtagcgcacagcggcccacaggcggcgttactcaccgcgaatggtctgtatgcggtggtctttgtgatgtgctttgcgctcggctttgtatcccgtcatcgtcagcatagcgcgccggctacgcattgataatccttgccggatggagacatcgccctccggcactctatcccccctcctgacggggtaggcctgttggtctaaaaacccctcattttgtatgttatttgtacaaacctgaaaagcctgacaattccgccacttataaaaatccagacaaatcagccatatacccattaagaggtatataaaggtgaatttgatttacatcaataagcggggttgctgaatcgttaaggtaggcggtaatagaaaagaaatcgaggcaaaaatgagcaaagtcagactcgctattatcggtaatggtatggtcggccaccgctttattgaggatctccttgataaatccgacgctagcctgttcgacattaccgtgttctgtgaagaaccccgtaaagcctatgaccgtgtccacctgtcatcctacttctctcaccacaccgcggaagagctctctctggtgcgtgaaggattttacgagaagcacggcgtaaaggtactggttggcgaacgcgcaattaccattaaccgtcaggagaaagtgattcactccagcgcgggtcgtaccgtttattatgacaagctgatcatggcgaccggttcctatccgtggatcccgccgattaaaggctccgaaacccaggattgcttcgtttaccgtaccattgaagacctcaacgctatcgaagcctgcgcccgtcgcagcaagcgcggggcggtggtcggcggcggtctgctggggctggaagccgctggcgcgctgaaaaacctcggcgtggaaacgcacgtcattgaatttgcgccaatgctgatggcagaacagctcgatcagatgggcggcgagcagctacgtcgcaagatcgaaagcatgggcgtgcgtgtacacaccagtaaaaacacgcaagagattgttcagcagggtaacgaagcgcgtaagactatgcgttttgccgacggcagcgagctggaagtcgatttcatcgtcttctctaccggtattcgcccccgcgacaagctggctacccagtgcggtctggccgtcgcgcagcgcggcgggatcgtgattaacgacacctgccagacgtccgacccggatatctacgctatcggcgagtgcgccagttggaacaaccgcgtttacggtctggtcgcaccaggctataaaatggcccaggtcgccgttgaccacatcctcggcagtgaaaacgcctttgaaggggcggatctcagcgccaagctgaagctgctgggcgtggacgtcggcggcatcggcgacgcgcatggccgcacgccgggcgcgcgtagttacgtttacctcgatgaaagcaaagaagtctacaaacgtctaattgtcagcgaagataacaaaacgctgctcggcgcagtactggtcggcgacaccagcgattacggcaatttgctgcaactggtactgaacgccatcgaactgccggaaaacccggattcgctgatcctgccgtcgcacgcgggcagtggtaaacccgctatcggcgtggataaactgccggacagcgcgcagatctgctcctgcttcgatgtgactaaaggcgatctgatcgccgctatcaataaaggctgccataccgtggcggcgctgaaagcggaaaccaaagccggaaccggctgcggcggctgcatcccgctggtgacgcaggtactgaacgccgaactggcgaaacagggtattgaagtcaacaacaacctgtgcgagcactttgcttattctcgtcaggaactgttccacttaatccgcgtggaaggtatcaaaacctttgaagaactgctggcgaaacacggtaaaggctacggctgcgaagtgtgtaagccgaccgtcggttcgctgctggcgtcgtgctggaacgaatacatcctcaagccgcagcacacgccgctacaggatactaacgataacttcctagcgaatatccagaaagacggtacttactcggtgatcccgcgctcggcgggcggcgaaatcaccccggaaggtctggtggccgtgggtcgtatcgcccgcgagtttaacctctataccaaaatcaccggttctcagcgtatcggcctgtttggcgcgcaaaaagacgatctgccggaaatctggcgtcagttgattgaagccggtttcgaaaccggtcacgcgtatgccaaagcgctgcggatggcgaaaacctgcgtcggcagcacctggtgccgctacggcgtgggcgacagcgtcggtttcggcgtggagctggaaaaccgctacaaaggcattcgtaccccgcacaaaatgaaattcggcgtctccggctgtacccgtgaatgtgcggaagcgcagggcaaagatgtgggtatcatcgccacggagaaaggctggaacctgtacgtctgcggtaacggcgggatgaaaccgcgtcatgcggatctgctggcagccgatctcgatcgcgacacgctgatcaagtacctcgaccgctttatgatgttctacatccgtactgccgacaaactgacccgtaccgcgccgtggctggataatctggaaggcggcatcgagtacctgaaatcggtcatcatcgacgataagctgggcctgaacgaacatctggaagaagagatggcgcgcctgcgcgcagcggtggtctgcgagtggacagaaaccgttaacaccccatccgcacaggttcgctttaagcactttatcaacagcgacaaacgcgacccgaacgtccaggttgtgcctgaacgtgaacagcatcgtccggccacgccgtatgaacgtatcccggtcactctggtggaggaaaacgcatgagtcagtggcaaaacatctgcaaaatcgatgacatcctgccgggaaccggcgtctgcgcgctgtcaggcggcgagcaggtggcaattttccgtccttaccatagcgatcaggtgtttgcgatcagcaacatcgacccgttctttgaggccagtgtgctgtctcgtgggctgattgcggaacaccagggcgaactgtgggtcgccagcccgttgaaaaagcagcgcttccgcctgagcgatggtttatgcatggaagatgagcagttttctgtgaaacattacgacgcgcgggtaaaagacggcgtggtgcagttgcgcggttaattatttttgggaggcgcaacgcctccccttttttgtattttttttcattttaattgttatcacaaaatcatttgtactgcatcgcggcggcaactgagcaacaaattcgtcaggaacgaatttgaacagccgctggctgccttcggtgagggacaaggatgtccctcattaatccccaggagcatagttcactatgtgactggggtgagcgagggcagccaacaaagaggcagtgcaaaggatgaagtgagaaaaggataatcaaatgtttacagacactatcaataagtgtgcggctaacgctgcgcgcatcgcacgcctgtcggcgaataatccgctcggcttctgggtcagttcggcaatggccggggcttatgtcggtctcggcatcattcttattttcaccctcggcaatctgctcgacccgtccgtacgtcctctggtgatgggagccaccttcggtatcgccttaacgctggtcatcatcgccggttccgaactgtttaccggccacaccatgttcctgacgctgggcgtcaaagcaggcaccatcagccacggtcaaatgtgggctatcctgccgcaaacctggctcggcaacctggtcggttccgtgtttgtcgccctgctttacagctggggcggcggcagtttattgccggtcgataccagcatcgttcactcagtcgcgctggcgaaaaccaccgcgcccgccacggtactgttcttcaaaggcgcgctgtgtaactggctggtttgtctggcaatctggatggcaatccgcaccgaaggcacggcaaaatttcttgctatctggtggtgtctgctggcgtttatcgcttccggctacgagcactccgtcgcgaatatgacgctgttcgccctctcctggtttggtcatcacagcgacgcctataccctggccggaattggtcataacctgttgtgggtgacactcggtaatactttgtccggtgtcgtattcatgggattgggttattggtatgctacgccaaaatcggagcgtccggctccggcaaaaatcaatcagccagaggctgctgccaataattaaggggtaatgtcgtggaccatttgcctatattttgtcaattacgcgaccgcgactgtctgatcgtcggcggtggcgatgtcgcagaacgcaaagcacggttactgctggaagcaggcgcacgtttaacggtcaatgcgctaacctttattccacagttcaccgtatgggcaaatgaaggcatgttgactctggttgagggaccgttcgacgaaacgcttctcgactcgtgttggctggcgatcgcggccactgacgacgataccgtcaaccagcgcgtcagcgacgcggcggagtcacgccgtatcttttgcaacgtggtggatgcgccgaaagccgccagctttatcatgccctccattattgaccgctcgccgctgatggtcgccgtctcctcgggcggcacctccccggtgctggcgcgtctgctgcgcgagaaactggaatcgctgctgccgcagcatctggggcaggtcgcgcgctatgccgggcaactccgcgcccgagtgaaaaagcagtttgccacgatgggcgagcgtcgtcgcttctgggaaaaatttttcgtcaatgaccggctggcgcagtcgctggcgaatgccgatgagaaagcggttaacgcgacaaccgaacgcctgtttagcgaaccgctggatcaccgtggcgaagtcgtgctggtcggcgccgggccgggcgatgccggactgctgacgctgaaagggttacaacaaatccaacaggcggatatcgtggtttacgatcgcctcgtctccgacgacattatgaacctggtacgccgcgatgccgatcgggtctttgtggggaaacgcgcgggttaccactgcgtcccacaggaggaaatcaaccagatcctgctgcgtgaagcgcaaaaaggtaaacgcgtggtacgcctgaaaggcggcgatccctttatctttggtcgcggcggcgaagagctggaaacgctgtgtcatgccggtattcctttctcggtagtgccggggattaccgcggcttccggctgctccgcctactccggtattccgctaactcatcgcgattacgcccagagcgtacgtctggtcacgggtcacctgaaaaccggcggcgagctggactgggaaaacctggcggcagaaaaacagacgctggtgttctacatggggctgaatcaggcagcgactatccaggaaaaactgatcgcattcggtatgcaggccgatatgccggttgcgctggtagaaaacggtacctccgtgaagcaacgcgtcgtccacggtgtgctgacgcagctcggtgaattagcgcaacaggttgaaagcccggcgctgattatcgttggtcgcgtggtagccttacgcgataaattaaattggttctctaatcattaattaaaataacgccctgttattcagggctttattttacaactactcgtaatctcaaattatttttacttaaaagtgaattaagaaactaactttaaatacaccggacaaatttaaataataataattctgcctaaaaacccttttactcgtcaaattcacctcttattcattcatacaataaataacaccgttaagcactcaatttgacctgacctggttatcgggtgataaaataaacactaaagcataatttttcttctggccatttcatcattgcctgtaccgctctctgcatatgtttagtacgcaaggaaaatattaattaaggatgaaccctatgcaaaagaaaaaacttatttctatcgctatcgctttaacgctacaaagttattacattccggccatcgccgcagaaaataacgatgatgaaaaagaatgtcccagtaatatctcctccctgcctaaagaaaaacgcgcaaaactctcaccgacctgccttgctacacctgaaaatgataatcactggggctgggttgctggcggcgttgctgcattggtcgcaggtgtggctattggcgttgaaaataacggtggcggagattctaatcattcttataccccccctaagcccgataatggcggcgacgtcaccccgcccgacgatggcggcaacgtcaccccgcccgacgatggcggcaacgtcaccccgcccgacgatggcggcgatgacaatgtgaccccgcccgacgatagtggcgatgacgatgtggccccgcctgacgatagcggcgatgacgatgtaaccccgcccgacgatagcggcgatgatgatgtgaccccgcccgacgatagcggcgatggcgatgtgaccccgcccgacgatagcggcgatgacgatgtaaccccgcccgacgatagcggcgatgacgatgtgaccccgcctgacgatagcggcgatgacgatgtaaccccgcccgacgatagcggcgatgacgatgtgaccccgcccgatgatagcggcgatgacgatgtgaccccgcccgatgatagcggcgatgacgatgtaaccccgcccgatgatagcggcgatgacgacgacacgcccccagatgactctgttattaccttcagcaacggcgtcaccatcgataaaggcaaagacaccctgaccttcgacagcttcaaactggataacggcagcgttcttgagggtgccgtgtggaattattcagaacaggacaaccagtggcagctcaccaccgcggacggtaaaacgctgaacgtcaccggctgggacgtgaccgacgccaatgccgccgtgattgaaggcacccaggaaaacggtctctactggaagtacgacagccggggctatctgattattgccgacgataacaccaccgttatcagcggcgatgaccaggcgcataattccgatcgcggcatggatatcagcggccaggatcgcaccggcgtgattatttccggcgatagaaccgtcaacacgctcaccggggactccagtgtgaccgacggtgccaccggcatggttatctccggtgacggcaccaccaacaccatttcgggccactccacggtggacaacgccaccggcgcgctgatttccggcaacggcaccaccaccaatttcgccggtgacattgccgtgagcggcggcggcaccgccatcatcatcgacggcgacaacgccacgattaagaataccggtacctctgacatcagcggcgcaggctccaccggcaccgtcattgacggcaataacgcccgcgtcaacaatgacggtgatatgaccatcaccgacggcggcaccggcggccacattaccggcgacaacgtggttatcgataacgccgggagcactaccgtcagcggcgcagacgccacggcgctgtatatcgaaggcgacaacgcgctcgttatcaacgaaggtaatcaaactatctctggcggcgccgtcggtacgcgcattgacggcgacgacgcccataccaccaataccggtgatatcgcggtggatggcgcgggctctgccgccgtgattatcaacggcgacaacggcagcctgacccaggcgggcgatctgctggtcaccgacggcgcgatgggcatcatcacctatggcaccggaaatgaagcaaaaaataccggcaacgccaccgtacgtgatgcggactcggtgggttttgtggttgcaggcgaaaaaaacaccttcaaaaacaaaggggatattgacgtcagccttaacggcaccggcgcgctggtgagcggcgatatgtcgcaggttacgctggatggcgatattaacgttgtctcagtccaggacagcgaaggcgtgtttagctcagcgacaggggtgagcgtgagcggcgacagcaacgccgttgatatcaccggcaacgtaaatatcagcgccgactacgggcaggatgatctggctgccggggctcccccgttaaccggcgttgtcgtcggcggtaacggcaataccgttacccttaatggcgcgctgaatattgatgacaacgatctgtccgccaccggcggacaatacctggacgttgttggcctgagcgtaacaggtgatgataacgacgttgagattgacggcggtattaatatcacccacagcgaggatccacttgatggaacctctgcagacattaccggcatcagcgtcagcggtaacagtaccgttacgctaaacggtcattctaccattgataccaacacggtagtgggggggcacgttgtactggcgcgggtcaacaacggcggctccctgattctgggtgatgactcagttgttgacgttaatgtcagttatatacccacaggctattacacctacaacgcgttgctgatggctgatggcgaaggcacatcaattgaaaataaaggcgatattacaagccatggcgtgtattccgtcattcgcgcagataacggctcggaagtcagcaacagcggagatattctggtctacgcgaccagtagcaacagtagtgaggatcgtgcagccatcacaagggctagtggcgagggatcggctgttcataacaaagccggcggcgatatcaccctcatttctgatcagacgccgcagggcagtggcggtattgaagtatacccattgaaatggtacacccacaccttttacgccatgatggcttcggattatggcgatgtcgttaacgatgagggcgccacgatccatttgcagggggcaggtgtatatggcgttaccgccagccgaggtaaagcactaaacgaaggcaatatctatctggatggccttgtcccgacgctggacgatgaaaataacatcaccagcaccagctactggcagccatcatcgctctatctcaccagctcaggaatggtggcgggttccaccgatgccgatggcgacgccaccgccatcaacaccggcaacattaccgtcaacaacgccgggttcggcatgatggcgcttaatggcggcaccgccattaaccagggcgtgatcaccctgaccgccgatgacggcgtgaccggtcaggcagacgagctggtcgggatggcggcgctcaacggcggcgtcgtcatcaacgacaccagcggcgtgattaacatcgacgccgattacggccaggcgtttctgagcgacagttccagctacatcatcaataacggctctatcaaccttaacggcagcccgatggatgatactgattcacacatgggcggcacgccaacggacaaaatctggattcagtctctgcccggcagcggcgacagcgacaccaggacctccgacacaggtttcttcaccgccggtacgctggccaactacggtactgaaaccctgaacggcgatgtggacgttaacgggggctggctgtacaacgaagcgggcgcctcgctcaccgtcaacggcaccgtgacgattaacggcggggctaacgcgctggctaactacgggacgctggacgcggacgctatttccacctggcacagcctctttaatgaagcggacggcagcatcaccaccgatctgttaacccttaatggcgacgtcactttttacaataacggcgatttcaccggctccatagcgggcaccagctaccagcaggaaatcgtcaatactggcgatatgacggtggcggaagatggcaaatcgctggtcagcggcagcttctatttctataacgaagaggacgctacgcttaccaacagcggcagcgcggtggaaggcggcgagaacaccatcatcaatctgacgcgcgccaacgattcgctgacccaggtgaacagcggcaccatcaccgccactaacggttacagcgccatcaccacggtcaacggcagcaatgaccccaaatggatctggaacaccgcaaccggcgtgattaacggtattaacccggatgcgccgctaatcaatttgggccgcggctataacttcggcaaccagggcactatcaacgtgcagggcgataacgccgtggcgattagcggcggcaccagcagttatgtcattaacctggtcaatagcggcaccatcaacgtcggtaccgagcagggcaaggaggacggcaccaacggcaccgggcttatcggcatcaagggcaacggtaatgccaccaccataaacaacaccgcagacggcgtgatcaacgtttacgcggatgactcgtatgcgtttggcggcaagaccaaagccatcatcaacaacggcgaaatcaacctgctgtgcgacagcggctgcgacatctacgcgccgggtactacgggcacgcagaacgaccataacgggacagcggacatcgtcatcccggatgcgactaccgccccgaccgagggcagcatcccgacgccgccagcggatcccaacgcgccgcagcagctctccaactatattgttggcaccaacgccgacggtagctccggtacgctgaaagccaataacctggtgattggcgacaacgtgaaggtggataccggctttaccagcggtacggcggataccaccgtggtggtggataacgccttcaccggcagcaatatccagggcgcggacaacatcacttccaccagcgtggtgtggaacgcccagggtagccaggatgccgacggcaacgttgacgtcaccatgaccaaaaacgcctatgccgatgtggcgaccgacagctcggtaagcgacgtggcgcaggcgctggacgccggttacaccaacaacgagctgtacaccagccttaatgtggggactaccgccgagctgaacagcgcactcaagcaggtgagcggtgctcaagccaccacggtattccgtgaagcgcgtgtactcagcaaccgctttaccatgctggccgacgccgcgccgcaaattaaagatggtctggcgttcaacgtggtggcgaaaggcgacccacgtgcggagctgggcaacaacacccagtacgacatgctggcattacgccagacgttggatctcaccgccagccagaatctgacgctggagtacggtattgcgcgtctggatggcgacggttcgaaaactgcgggcgataacggcctgacaggcgactacagccagttctttggcctgaagcacagcatggcgtttgatgaaggtctggcgtggaacaacagcctacgctatgacgtgcataacctcgacagcagccgttctgttgcctatggcgatgtcaacaaaattgccgattccgacatgcgtcagcagtaccttgagtttcgcagtgaaggggcgaaaactttcaccatgatgggcgatgcgctgaaagtcacgccgtatgccggggtgaaattccgtcacaccatggaagatggctacaaagagcgcagcgccggagattttaacctgtcgatgaactctggcaacgaaacggcggtagactctattgtcggcctgaagctggattacgccgggaaagacggctggagcgccaccgctaccctggaaggtggcccgaacctgagctacagcaagagccagcgtacagcgtcattacagggtgcggcgggtcaatcgttcggcgtggatgacggtcaaaaaggcggcggcgttaatggtctggcaaccatcggcgtgaaatacagcagcaatgataccgcgctacatctggatgcctaccagtggaaggaagacggtatcagcgataaaggctttatgcttaacgttaagaaaacatttcgttaaataaacgacattatataacactaataaatatcctccggcatagccggaggtttttcagatgcgcctataaggctctcttaccagccgcgccctaacaggcgcatacgatctgacatttgcatcaaacttcgttacttacggcccgtaaacgggctgcccggatacgggatcgataattgctcacccattttatcctcttcaagctggtgctttatgtagtcctgtatcttcgccgtgttcttacccaccgtatcgacatagtaccctctgcaccagaactccctgttcctgtatttgaattttagatccccaaactgctcgtaaagcatcagactacttttacccttcagatatcccatgaaactcgacacactcatcttcggcgggatctccagaagcatgtgaatatgatctgcacaacattctgcttccagaattcgtacgtttttccattcacacaattttcttaatatgctgcctactgccctacgcttctctccatagaacgcttgtcttcggtatttgggcgcgaaaactatgtgatatttacagttccatcgggtgtgcgctaagctcttttcgtcccccattgggacccccttttgatttcttgttgaacttttgcagttgccagaccgcaagatgttttaacaaatcaaaaggggttttaataactggcttaaagctgaaagctttccggaacccccagcctagctgggggttttccatagacaataaaggccgcttattattaagcggcctttttaaatcatatcccctggtaaagataaagtccttatttggactacctggatgattcattaattgctatcgtactatacgctaaatagatcttatatttattccaccagtagtgctcgttttatcaacaaggattttgaaatgtttaaatttgtaaaaattgccgttgtggcaggggttctggcgacgctcactgcttgtactggtcatatcgaaaacaaaaaaaataactgcagctacgattatttgctgcaccctgcaatttctatttctaaaattattggcggttgcggcccggctgccgatcaataatagaaacgactgcgcagatacaaaaaaaccgggattttcccggtttttttacaggtctgataaacggtacggcacaggtgccttgtccaacttacgctcgttggtaggcccgataagctagcgccatcgggcacgcaataacccttacggtttcgccacaaagccaatggcttcgtaaacggctttcagcgtttcggccgcacgtgcgctggctttttccgccccgtctttcatcaccttctgcaagaacgcttcgtcgttgcggaaacggtgatagcgctcctgcaactcagacaacattccggaaaccgcctccgccacttcgcctttcaaatggccatacattttaccttcaaactgtttttccagttcaggaatgctctgaccggtcacggcggaaagaatatccagcaggttagagacacccgctttctctttcacatcataacgcaccaccggcggctcgtcggagtcagtgaccgcacgtttgattttcttcactaccgatttcggatcttccagcaagccgatcacgttattacggttatcgtccgatttggacattttctttgtcggctccagcagcgacatcacgcgcgcgccggatttgggaataaacggttccggtactttgaaaatatcgccatacagcccgttaaaacgctgggcgatatcgcggctcagttccagatgctgcttctgatcttcgcctaccggcaccagattggtttggtacaacagaatgtctgccgccatcagcaccgggtaatcaaacaggccggcgttaatgttttccgcatagcgcgcagatttatctttaaactgcgtcatacggctcagctcgccgaaataggtatagcagttcagcgcccagccaagctgcgcatgttccggcacatgggactgaacgaaaatagtgctcttttcaggatcaataccacatgccaggtacagcgccagcgtatccagcgtcgctttacgtagctgctgcgcgtcctgacgcacggtaatagcatgttggtctacgatgcagtagatgcaatgatagtcatcctgcatgtttacccactgacgcaatgcccccatatagttgccaatggtcaattcacctgagggctgtgcgccactaaaaacgatgggcttagtcattttttatttcctggttatcgctatgcggaagcccaagtgcgggcaaaagatcgttaaaactgtcataaatgacgtccggctcgctaagagcgatcgcttcgccataattgtagccgtatgtcaggccaaccgaagggcagcccgccgcttttgcagcctgaatatcattacgcgaatcgccgacaaaaagcatctgctccggcatcatgcccagccggcttgccaccagcaacagcggctccggatgcggcttcttattttgcacatcatcgccgccgataaccacactaaagtatttggcgatatcaagcgattccagcaacggcgcgacgaacggcgtcggcttattcgtcaccagacctaatgacaatccgctggcgtgcagcgcgcccagcgtgtcggcgacatggggaaataaaacggtgccctcttccgccacttcgccataatacctgtcgaacagcttacgcagaatacgtacctgttcctcggcaggaatatcttcatcaacgggcggtttacccatcgtcttacgcagcgtggcgcgctcctcgcgagcccaggtcagcgcgcgttccatcaatacgtctgcgccgttaccaatccaggtaatcacgcgctcctcgcccgcgaccggcagttccagcgcatacagcgccatatccaccgccgcggcaagacccggcgcgctatccaccagcgtgccgtcaagatcaaaggcgacgccccgaatattctgcaacttatccatgagttacctttgccagctcactgcgcatttcatcaatcacttttttatagtcgggtttatcgaaaattgccgaccccgcaacaaacatgtccgcacctgctgcggcgatctcgccgatattgttcaccttcacgccgccgtccacttccaggcgaatgtcgtaaccggacgcatcaatgcggcgacgcacttcgcgcagtttatccagcgtctgcggaataaaagactggccgccgaagcctgggttcacggacatcagcaggatcacatccagtttgtccatgacgtaatcgagataactgagcggcgttgccgggttgaataccagccccgctttacagccgtgttctttaatcagctgtagcgtgcggtcaacatgttcggaggcttccgggtgaaaggtaatgatgctcgcgccagcggcggcaaagtcgggcacgatacggtcgactggcttgaccatcaggtggacatcaataggcgcggtaataccgtactgacgcagggatttcagcaccatcgggccgatagtcaggttcggcacatagtgattatccatgacgtcaaagtgtacaacatcagcaccggcagccagcgctttggcggtgtcttcacccaggcgagcaaaatcagccgacagaattgagggggcaatcaaatactgtttcatccgcttctccttgagaattattttcttgcaggcgttgcgactcctggttggtacagagccagcagttcgtccacctttttacgtgtgccgccgttgctgcttatactgcgtctaactttgacgacatgcaattttgcgagttgataccactcgcgtgtgagcgccgtatcatggttggaaatgagcaccggtatccggttactgaccagattctcagcgatttccgccagatgcgcttgttgcgtcaggctaaaactattggtgtgatacgctgtgaagttagccgtggcggacaacggcgcataaggcggatcgcaatagaccaccgacgacttgtccgcacgcgccatactgtctgcgtatgactcacagtaaaagaacgcattctgcgctttttctgcaaagtggtacaactccgcttccgggaagtaaggtcttttataacgaccaaacggtacattaaattccccgcgtaagttatagcgacagagtccgttataaccgtagcggttcagatataaaaacagtaccgcccgacgaaaggggtcctggcaggtgttgaactcctcgcggagttggtaatagacctcagcctggttagtttcaggcataaacagctcgcgcgaagcctgtacatactcgtcagtacgtaacttcacgatgttatagaggctaataaggtcgctgttgatatcggcgaggatataacgagaaaagtcggtgttaagaaacaccgatccggcacccacaaaaggttcgacaaggcactcgccttttggcaaatgtcgtttgatatcatcaagcagagggtattttccccctgcccacttcaaaaaagcgcgattttttttcatgctgactaactaattacaccttctccggctgtggagaaagctccgacagcatcctgcgctttaggctgtgccgcgttgctttacggcgcatttgacggtagcaaatgcgcccctcgcgcctgtcctgaacaaaaatagctgtcagcgacactcacaggcaattgcaggacacagcctggattatttcagatcggcctgaacctgatgcaacggttttgcccacgggtttttcgcctgcacatcggcaggtaaggtggacaccgcacgtttagcatcttctttcgaagcatacatccccgttaccagcacataccacggttgtccattacgcgtcgtctcgtataccacataatttttcaggttctctttcttcgcccaaccgttcaggttgtcgtaatttgaagaactactgagctgcaatgtgtagtggctggatggcgcgctctttaatgcgccaacgttgccggcgcttttcccgccgcctgcgacaggcgtcgtcgaggcttgcgctggcttcgcggtttgtaccggcgcagcgcttgccgtcgctgtcggcgcagccgtcgtggtggtcgctttcggcgtcgcggctggcgctgccggttccgtgcgtttcactggcgcgaccggtttcttcggttccgcagtggtggttttcgccgtggtctgcggtttcttaggttcaatgacggcctgtttacgttccggacgcgtggtatgacgctcggcaggttcgctaaccgccgcctgacgcgtcgtgctgccattgcgaactggcgcgacggttgcaggctctgtcggcaacgtagagttcaccgcaacattgttcatctgctctggattctgcgtcagcgcattattcagatcgccctgcacttccacgcgctgctgaccgtcagcgaccacaggcgactgtccctgcgtcggcgttgaagaaatcggcggcaacgaaatatcctgcgacgtattgcccgcggtttgttctgcggaggtggcgcccggcgcaggctgggtcgcattcgcctgatcggcggcgttaccggaaagatcgatactcttttcgccagaggccgacggctcgctggaagacgttgagggggctttcagcgcggagccgataccgataatcaacagcagcagcaccagcacgccaacgcccatcatcatgtattgacgagaggctggcttatgggccgcttttttacgcttacgtggacggcgttcaacacgctcttcgtccaccgtatcgtcttcatcggattcgtactcttcttcaacttcaggttcttcactacgcgctttacgcgtacgcgtcggacggcgatcgtcggcgtccagatcaacgtcatcaaagttgatctgcggttcactatcgcgttctgaagattgacgagaacgaccagtacgacgatcgctgggatcgggtttcagctcgtcttctggtttgaattcatccatttaacaccccactcaaaggttaatgcttacgacattgcacataacctgaagctaaaaaactgacatctacgcaatatcagtttgacctttcttgttgtcacgcctgctgacagtcagcaatcgcgctaagaacgacttcgtgcgacactccgccgcgcacttcacttttccctatggccagcggaagcactaaacgcagctcccccgctaacacttttttatctcgcagcatgtgcggcaaatagtcctgcgcggacatctcgcaagggccattgactggcaacccggcccgttcgagtagagcgatgatgcgctgcgtatcagcagaactgaactgccctaaacgctcggatgcgcgtgcagccatcactatacctgcggcaacggcttcaccatgtaaccaattgccatatcccatttccgcttcaatggcgtggccaaaggtatgtccaagattcagtaaagcacgtaagcccgcttcacgctcgtcggcggcaacaacttcggctttcagctcgcaacaacgacgaatacagtacgccatcgccgggccgtccagacgcaatagcgcatccagattaccttcaagccaggtgaagaagtccgcgtcgagtataatgccgtatttgatcacctctgccagtcccgatgtcagttcgcgtgcgggaagcgttttcaggcaatcaagatcgacaaccacagaagcgggttggtaaaacgcgccaatcatgtttttgccaaggggatggttgacggcggtcttcccgcccacggaagaatcaacctgcgacagtaaggtagttggcacctggatgaaacgaacgcctcgctggtagctggccgccgcaaaaccggtgagatcgccaatcacgccgccgccaagcgcgaccagcgtggtatcacgaccatgcggttttttcagtaacgccgtaaacaccgtatccagcaccgtcaggctcttatactgctcgccgtcaggaagaatcacgctgtctacgttaacgcccgcccgttcgagtacgccgcgaaccttgtccagataaagcggcgccagggtttcgttggtcactaacatgacctgatcgcctgatttcagcggcaagaatgaagctggttcgttaaacaaaccagccgcgatggtgatcgggtaactacgttccccgagagtgactgtaatcctctccatgacgcgacatccaccttagttacttgtgcccgcttacccagcgtattctgcttgaattagttgctttccagcatatgaataatctggtttgccacaaccttagcgctttgatcgtcggtgcgaatggtgacgtcggcaatctcttcgtacagcggattgcgttcgttagccagcgcttccagaacttcgcgaggcggtgcttcaacctgcaacagcgggcgttttttatcacgctgcgtgcgcgccagttgtttttcgatggtcgtttcaaggtagaccacgacgccacgcgcggagagacggttacgcgtttcacgcgattttacagagccaccgccggttgccagcacaataccctgtttttccgtcaattcgttgataactttttcttcacgattacggaagccgtcttcaccttcaacatcgaagacccagcccacatcagctccggttcgtttctcaatctcttgatcagaatcgtaaaattccatattgagttgttgagctaactggcgcccaatagtgctttttccggcacccataggcccaaccagaaagatattgcgtttctctgccattttttcggtactactaagactattcgttaatggtaaacccgcttcacagacacccagcgcagcaggacatgaactgaaacctcataagatattgcgagagtcagactgaaaattatctcaatactcaagcgggtttggcaactgaataaatcaccaagcctgattgttgcaaaacccgagttagcgttgccgaatggcgaccagaacaacatatccggcctacaaattgctctactttcaaacaattgtgcgcaatccgcagaaccaatacgtctgcatcagcggacattcagccgtttatcatcggtcttatgcacaccttcggcaaggcaaagcgcattaatcaatgcgtaagcaacgaaaagcacgactctcaaatcggtactccttgtatgctaaatacatccgcacgtcaaatcccgcagatgcgttcagtgcaaaaacagcgcttttttatgcataaattattctgtcgccaccagtctgggggtgataaacaccactaattcgcgtcgctcgtcctctttaccgtcatggcggaagagctgaccaagccagggaatatcccccaacagcggcacgctatcgctacccgatttattttttcgcgaaaaaataccgcccagcgccagcgtctcgccgctttttacctctacctgcgtttcaatttcctgtttatctatcgccagcacttcgccgtcagcctgttgtagtacctgaccgggaacattctggctgatatgtaacttcaggcggatgcgccctttttgcaaaacggtgggcgtcacctccattcccagtaccgcttctttaaattccacggaggtcgcgccgctttcgccgctggaaacctgataaggaatttcgctgccttgcttgatactggctggctgtagatgcgaagccagcagccgggggctggcgataatatccaacagctgcttttgttccagcgctgacagctccagatccagcaagcgtccgttaatgcgcccgatgttaaacccgacgcgtgaggtggcggcggcgacagataaatcactggaaagcgtcgtcacgtcacccaccgagcccgcttgcgtcgcgtcagccagcgtccactttacgcccagttcccgtagactcttttcgttaatggtaacgatatgcgccgccagctccacctgcgccaccggcagatccatttgcgatacccatttttccagctccgccaaggccgcgcggttatcgcgcaacagcaggcggttggtgcgcttatctaccatgatggttcccttcgcgctcaggagtttctcgcccgctttcgccagttcgccggcatcggcgtattgcaggctaatgctgcggttttccagcggtaaattagcctgaaaccttaaccgctcggcatcctgccgcgcactgtgttctttctgccaggcctgtgaatgaacatggagaatattcccctcctgacgtagcaccagccccgcgctattgaccaccgtctgtagcgcctgtttccacggcacatccgtcagatgtagcgataatgtcccgctgacgtccggcgacaccaccagattctgccgctcctgctcggctaaagtctgcaaaacctgcaccacagggacgtcatcaaccaccagcgtcactttcgccgcttttcccgcctgcgcggcgggcatcaaggctatcagtattatggctatccatcgcttcattgtccgctccctgacgtagccaccgccactgcggcggcgcacaatttttaccggtcgttaacgttaaggtttccgccgtcaggcggacaatcgtccaaccgttttccagcgtctgcccttcttccactcgtcgccatttttgctgactgtctttaagaatgcctgtccatcgctcgcctttacgcaccgcgccctgataccgccactgcgagagttccgctatccggcagcgatcttccggcgggcggaagggatcgcgcattcctgtcaacatcagcaaacaaaaacagagcaatacactgcggctagccttcattcgccaggcgctccagttgcagcgtcatcaataattccgccccctctttacgcaatgaaaaccgacttacgctcatctcgctttcggccaaccggacaaacagcgacggcaccgcatcccaggacgttttcagcgccatttctcccccctgcgccgatggctgccagtgcagcaaacgcaggggaggcgcctggaaatctaacggcgaaaaaggacgcggattttccactgtgcgcccgaaaagcggttcagccgcgacgctcagacggcgcagatgacgccactgttgccgggcggcctcgcgctgctggcttaaccgcgtttgttgcgtatccaacgttttccagccgggatagcccacagataacgcaaccgtcagcgtcaggcacagcacgcctgcacaccaataaaaaacccgaccacggcgcgacatcccgtaccagatatcaaagagcgcgttcacgggcggcgctcctcgttaactgataatggaactgccagcgcccttgcgcatcctgccgcgtggcgcccgtgcggtttagcggaaaactgacatagtgacgaagtgatgtctcaagcgtgagcagggcgtcaaacgttctcgccagcccttccagctctagcgtctcttgctgataattgaggcttgtcagccatgcctgctctggcaacaggttggcaaggtcagtcaagatagattgccaggcttgcgtcagttcacgctgcgcctgacgttgtaatcgcgcctgttgctgccgctgacgctgctgcaactgcggtatgttcgccgcaagcgccgtcgtgcgtccgttttccgtcgtcagtagcagctcgttaatcctcccctcctgccaaaaaaccaaccgggcgatcgtcgcgaggcttgctatcagcagcagggacgcgccccataccacgcaccacagccgcagacgcgctacgtaatgttggcgccgccaggggagcaaattgacagaatgcgccatcagcgtatctcccccatggctaaacccagcgcaatcgcaaagcgataaccgtccggcggaaccggcggttggcggacggtaacggcgtgccaggggtcgaattcgccttcggcgcataacgaaatatgttccggcacgacggataacgtcgcggcaaggtcatgcagcgtcatcgcctctcgcgccgatttacgtccccacgcatagcgcgtcgcccacagccactggctctcatcgcgccagaccagacattgccgccccgaaggtataaacggcagcaagcgctgtaacgcgcaggcatcgggcgttacagcagcgatgcgcacattgagcgtttgcgccagcgttaacagctctgaaatttctttgctttgcacggcggtaacgttgaacgcagggcttagcgcatcgtcctgaaagtcgaaacgcaataagtccggatccatatccagctcacgcgccatcgtttgtgaaagccatgcgacttgctcacgttcccgcagacgcatcggcggatgtggaaaagcgcgttgcaatgtccgatttgcgggaaaagagagataaatacggtgacgtagcggcagctcgcggctccagggtcgcagtacgtgagccagcgattgcgggtcaggaatcgtaccctctgccgtggaggcgttcatcagcggcagtcgccaccaacgttgcagagaccagcccgatgcgccgtgaataacggcgatggccagcgcttcatgctgctgaatatgcaatcctatttgccaggttttaaaagccataacggtcgatctccttatcacccgtcgcgttaacgggtatatcaatgcgtctggcttgcctttatactaccgcgcgtttgtttataaactgcccaaatgacactaaatgggaaatctccagtgaagttcgtaaagtatttattgatccttgcagtatgttgcatcctgctgggagcaggctcgatttatggcctttatcgctatattgagccacagctacctgacgtcgcgacattgaaagatgtgcgtttgcaaattccgatgcaggtttacagcgcggatggcgaacttatcgcgcaatatggcgaaaaacgtcgtattcccgttacgctcgatcaaattccgccggaaatgatcaacgcctttatcgccaccgaagatagccgcttttatgagcatcacggcattgacccggtaggtattttccgtgcggccagcgtcgcgctcttctccggtcacgcatcgcagggagcaagtaccattacccagcaactggcgcgaaacttcttccttagccccgaacgcacgctgatgcgcaagatcaaggaagcgtttctggcgattcgtattgagcagttgctgaataaaaatgagatcctcgaactctatctgaacaagatctatctcggctaccgcgcctatggcgttggcgcggcggcacaggtctactttggtaagacggtcgaccagcttagtctaagcgaaatggcggttatcgccgggctaccgaaagcgccttctacctttaacccgctctactcgatggatcgggcgatagcgcgccgtaacgtagtgctttcgcgaatgttaagcgagggatatatcactcaggcgcagtacgatcaggcccgtagcgaacctatcgacgcaaattatcacgcgccggaaatcgccttctccgcgccttatctgtcggaaatggtgcgccaggaaatgtataaccgttatggcgaaagcgcttacgaagatggttatcgtatttacacgaccatcacccgcaaagtgcagcaggccgcgcaacaggcggtgcgtaataacgtgctggactatgacatgcgccacggttatcgcggcccggcgaatgtgctatggaaagtgggcgaaacagcgtgggacagtaaaaaaattaccgatacgttgaaagcgttgccgacctacggaccgctgcttcccgccgtggtcaccagcgctaatccgcaagaggcgaccgctgcgcttgccgacggtacgtccgtttcgctacatatggaaggaatgcgttgggcgcggccttaccgctcggatacgcagcaggggccgacgccgcgtaaagttaccgatgtcgtccagacaggtcagcaaatctgggttcgtcaggtggataacgactggtggctggcgcaggtaccggaagtgaactccgcgctggtttcgcttaacccgcaaacaggcgcggtactggcgctggtcggcggtttcgattttaatcagagtaaatttaaccgcgcgacgcaagctttgcgtcaggtggggtcgaacatcaaaccgttcctctacaccgccgcaatggataaagggctgacgctcgccagtatgctcaacgatgtgccgatttcccgctgggacgccggggcaggttcagactggcgtccgaaaaactccccgccgcagtacgccggaccgattcgtttacgccaggggctggggcagtcgaaaaacgtggtgatggtacgcgccatgcgcgccatgggcgtcgactatgcggcggagtatttgcaacgcttcggcttcccggcgcagaatatcgtgcataccgaatcgctggcgctgggctccgcctccttcacgccgatgcaggttgcgcgcggttatgcggtgatggcgaacggcggtttcctgatcgacccgtatttcatcagcaagattgagaacgatcagggcggcgtgatcttcgaagcgaaaccgaaaatcgcctgcccggagtgcgatatcccggtcatttacggcaatacgcagaaatctgacgtgctggaaaacaccaatgtggaagaggtcgcggtttcgcaagagcagcaaaacagcgccgtaccgatgcctgagctggaacaggcaaaccaggcgctggtcgcgcaaaacggcacgcaggaatacgcgccgcatgtgatcaatacgccgctggcgtttctgatcaaaagcgcgctgaacaccaatatctttggcgaacccggctggatgggtaccggctggcgtgcggcgcgcgaccttaaacgtcgcgatatcggcggcaaaaccggtacgaccaacagctcgaaagacgcatggttctccggctatggtcctggcgtcgtcacttccgtatggatcggctttgacgatcaccgccgtgatttaggccgcaccaccgcttccggcgcgatcaaagatcaaatctccggctatgagggcggcgcgaagagcgcgcaacctgcatgggacgcctatatgaaagccgtgctggaaggcgtgccggaacagccgctaacgccgccgccgggcatcgtcacggtgaatatcgaccgcagtaccggacaactggcgagcggcggtaacagccgtgaagagtatttcatcgaaggcacgcagccgacacaacaggcggtacacgaggtgggaaccaccattattgataatggtgaaacacacgaactgttctgatcaaaaaaggcgctccggcgccttttttattgtgtttagcggatgacggcgaacggggagacaaactttccgttggcttgatcaacgccgcgccatcaggcaattcggccctgcgctttcaaccactcgcgtaccagaaacagcgcgctgacgttgcgggcctcgttaaaatcggggtcttccagcagatccattaaatgcgccagcggccagcgtacctgcggcaatggctcaggctcgtcgccttccagcgactccggatagagatcttccgccaccacgatattcattttgctggaaaaataagagggcgccatgctgagtttttttaagaaggtcaggttatgcgcgccaaacccgacctcttctttgagctcccggttcgccgcttcaaaaacggtctcgcccgggtcgatcaatcctttcgagaagcccagctcataggattcggttcccaccgcatactcacgaataagaatcagatgctcatcaacgatcggcacaatcattaccgcctcacgggttgatggtcgcatacgttcatacacgcgacgcacgccgttgctgaactccagatccacgctttctacgttaaacagtcgggattgtgcgacggtttccactttcagaatggtgggtttttgtaatgatttgctcattgtgagaatctttgcagtgtaatctgtggtcattgtgcgacataccgcacggtttcggcaatgcgaattgccgtttatttacatttatgtaacgtaataaaaattaattcttatttcaaattaaaagtcaataggttgaaataactccaggaatttgctgatattccgtttttggtggtattgctatgatttgccttcactgggatgcgctttacaatgctcaagttcaactccacgcttgccgatagccaaccacagaaaaatgtttattggacagggtgcgactgaccacgcctgacagacttagtaagatggggaaagcatgagcaccattctgatttttatagctgctttgctggcctgctctctactggcaatatggcggttccgggtaaagtccagacgagggagcttaccgtggatcagcgcctttcaggacgcgcaaacgcgtaaactgttgcccgaagagcgcagcgcggtagaaaactatctcgataaccttagccagatccagcaagttccggggccgacaggcgccagtgctgcgcccatctcgctgacgctgaacgcggaaagcaacagtgtcgtgatactaacccactccatcacccgctacggcattaccactgacgatcctaataaatggcgctactacctcgactccgtcgaagtccatctgccgcctttctgggaacagtacatcaatgatgaaaacaacgttgagctgatcctcacggatacgctgccgctggtgatctctttaaacggccatacgctgcaagagtatatgcaagagtcgcgcggctacgcgctacagaataccgcctctacgcaggcgtcgattcgcggcgaagagagcgagcagattgagctgttgaatatccgtcaggagacccacgaagaatatgcgctcagccgcccggctggcttgcgcgaagcgttgttaatcgtcgcctcctttttgttattctttttctgcctgataacgccagacgtttttgtaccgtggatgataggcggcgcgatcctgctgctggcagccggactttgggggctttttgcgccgccgtcgaaaagcgcgctgcgggaaattcactgtctgcggggaacgccccgccgctggggactgtttggggagaataatcaggagcagattaacaatatttcgctgggcatcatcgaccttatttaccctgcccactggcaaccctacattacgcaggatcttgggcaacaaacggatattgatatttaccttgatcgccatgtcgcgcgccagggccggtttttatccctgcatgatgaagtgaaaaacttcccgttgcagcactggttacgcagcactgttattgctatcggttcgctgctggtgttgtttatgctgctgttctggatcccgctggatatgccaatcaagttcacgctatcgtggatgaaaggcgcgcaaaccattgaagcgacaacggtaaaacagcttgaaaaagctggcgtgcgggtgggcgatacgctgcacctgagcggtaaaggaatgtgtaatattcattccggcgcgacctggagcggccagtctaactcaccgtttatgccgttcgattgctcgcaaatcatctggaatgacgcgcctgcgctaccgctgccggaatcagacctggtgaataaagcgatggcgctaagccaggcggtaaatcgtcagctccatccaaaacccgaagacgactcgcgcgtaagcgcatctttacgctccgcgatccaaaaatcgggcatggtattattagatgactttggcgatattgttctgaaaaccgctgatttgtgcgcggcggaagacgagtgcgtgcgtctgaaaaatgcgctggttaatctcggtaacagtaaggactggaacgcgctggtgaaacgcgcgaacgccggcaaactggacggcgtcaacgtgctgctacgccccgtaagcgcagagtcgctggaaaatctggtcacgacctcaacggcgccgtttatttctcgcgagaccgcgcgtgccgcccagtcgctgaatagccccgctcccggcggattcctgatcgccagcgatgaaggcagcgaactggttgatcagacctggccgtcaacgccgctgtatgactatcccgcgcaggaacagtggagcgccttccagcgtctggcgcaaacgctcatgcagacgccatttagcgccgagggcattgtcaccagcgtgtataccgatgccaacggcacgcagcatatcagcctgcatcgtatccccgataaatccggctggtggcgttacctcggcaccacgctgctgatgctggcaatgatagtgagcgcggtctacaacggcattcaggcgttcaggcgttatcaacgccaccgtacccgtatggcggacatccaggaatactatgaaagctgcctcaatcccaggttaaccgtctctccggaaaatctcatctgatagcgccgccgtgcgacagggtatgctaccctgtcgcgcaaattgcgttaccctggagttccccatgcatattgatattgactggcaaaacgtggataccgttttgctggatatggacggcacgctgctcgatctcgcgttcgataactatttctggcaaaagctggtaccggaaacctacggcgcgcagcagggtatttcgccgcaggacgcgcaggaatatattcgccagcagtatcatgccgtacagcatacgctaaactggtactgtctggattactggagcgagcgtctgggtctggatatttgcgccatgacgacggcgcaagggccgcgcgccgttttgcgcgacgataccgtaccgtttctgaatgcgttaaaagccagcggaaaacgtcggattctgctcaccaatgcgcatccacataacctggcggtgaagctggagcataccggtctggcctcacaccttgatttattactttccacccacacatttggttatcccaaagaggatcagcggttatggcgcgctgtcactgaggaaacgggaataagcgcagagaaaacgctgtttatcgatgacagcgaaccgattctcgacgccgccgcccggtttggtattcgctactgtcttggcgtgacgaatcctgattccggcctggcggaaaagcactatacgcgccatccgtccctgaacgactaccgccgtctgatcccctcgctgatgtgaaggagacgccatgaaagaaaagtcctccgttgaggtcagactggataaatggctgtgggccgcgcgtttttataaaacccgcgcgatggcccgcgagatgattgaaggcggtaaggtgcattacaacggccagcgcagtaagccgagcaaaatcgtcgagctgaacgcaacccttaccctgcgtcagggaaatgacgaacggacggtgatcgttaaagccatcaccgaacagcgccgtccggccagcgaagccgtcgctctgtatgaagagacggcggaaagcgtggaaaaacgcgaaaaaatggcgcaggcgcgcaagcttaacgccctgaccatgccgcatccggacaggcgaccggacaagaaagagcgccgcgacctgttacgatttaaacacggcgacagcgaataactgtcacccgcaagagagatgattatgccgcaacatgaccaattacatcgttatctgtttgaaaactttgccgttcgcggcgagctggtaaccgtttcggaaaccttgcaacagatcctcgacaatcataactatccgcagccggtgaaaaccgtactggccgaactgctggtcgccactagcctactgaccgcgacgctgaagtttgctggtgacattacggtacagctccagggcgacgggccgttaagcctggcggtgatcaatggcaataatcagcagcagatgcgcggcgtagctcgcgttcagggcgatatccctgacaatgcggatctcaaaacgctggttggcaacggctatctggtgatcaccattacgccggaagagggtgaacgctatcagggcgtggtgggtctggaaggcgatactctggcggcgtgcctggaagattacttcctgcgctccgagcagttgccgacgcgcctgtttatccgtaccggcgatgtcgacggtaaaccggcggcaggtggaatgttgcttcaggtgatgccggcacagaacgcgcaggcggaggatttcgaccatctggctatgttgacggaaaccattaaaagcgaagagctgctgacgttaccggcaaatgacgtgctgtggcgtttgtatcacgaagaagaagtcacgctctacgatccgcaaaatgttgaattcaaatgcacctgttcacgcgaacgttgcgcgggcgcgctgaaaacattgccggatgaagaagtggacagcattctggcggaagaaggcgaaatcgatatgcactgcgattactgcggcaatcattacctgttcaatgcgatggatatcgcggagatccgtaacaacgcctctcctgccgatccacaggttcattaatcgcctttcagtcgacaacatcattgcctgatggcgctcgcttatctggcctacagcatcccgctccgtaggccggataaggcatttatgccgccatccggcaaaaagcttactcgttgtagtaatccacatccaaccgctgaccatcaacaatgatatcgcgccaggctttgggggctgagtctaaccgatgcccggcaatcgcgtgcaacagttgcgtcttagaaaacccgtccggcagtcgggcgaacgctttctgcgtccatttcccctcttttaagccgtagacctggctctcggcaacaataaagttatacagcacctgctcaggctgaccgtcgccgttaagatcctgactcaccagcacgcaggcatccggttcaaggcaggaatcgtccgaataactctgctctttgacaaacgcccaaaatgcggcatccggcttctggctaccgggcgcaatcatcaccacccgcgctaaatcgtccgccgtcggagagaccttatttctctgcaaaaacgtcatcagttcacgattgcgctttctgttctgcgtaaacgcctcgtcatcccgcaacgatttcagcgcttcctggccaggtttgccgctgtgatccagcatatacaggctgatctgatccgcagtaattttaccactatggtaacgcgccatatggctgttgacgctaatacgccagacatcaagtacaggcgaggccagcaacagcaatatcaccagcgtcaacaaagagacgctcagtatcaccttgccttgccactcaccagggtcgcgtccgcggcgtaacagaccgatcagataaccgaaggaccataccagcaagacagacaccgtcagcgcaccatacagacgatccggcgtccaaccgtattgctgaatgcgtacccataacgcccagcccgccagcagcatatatatcggggcaacgcacagcgaggcgctaatcatgccgcgtagtacgcgcggatagggtaatacgcgcttttgcggttcgttgacaatcgccacgaggagcagcagcatcagcgtcagcgtggatagcagccccgcagcggaaacacgcgcagaaatcgcctccagtccggtaaagggtaacgtcacaataaacagcaatgccagcagcgacaccactggcagtaaacccgtcgcgatcagcgtcagcagcttttgcaccgccgccacaaggcgcgactgcgtgcgggcgagaatgaccgccagcgccgtaatcaggccgatggtcacataaataaaggcttcagtttcaaagaaaagggtgctgaaaaagcggatgcccaccagcctgaatagcgcgctccagagcagaagcaccagccagaacagtccgttagcgaccaggacgataaacaatgtcagtacgttatgccataaccgcagataaaactggggataacgcgccgaaccggtttgcgaatgtaactgatattgcatccagggtaagaccagcatcgccatcaacacaagccggagaccatacagccagaggagctcggccaggcgccatttctccaccgtctcaacctgccatttcagccagccgctcattgccagcacgaccacaaagatcagccccagccagccccacagcgcgcgctgtttaaaagagaccacggtaagcaatagcattgacgacaacgctatcgtcgcaggcataccatagaacagccagtcgctattttgtggtaccagccaggccatcagcaggtagcacaagacgccctgcagcaaaccggtgagcaacatcccccagcgagtagtatgtgaaagcgctacactttccatgtcgttatccagaatgatgagaaagccgcattattgcaccatctgttcaccgccaggcgtcgtcatgcataattcagaaaaaaacgcagagaggtgaatcgatattgttaatgttggtgttacgtaactttcttacatgaatgcgattacagtcacattatgtcggtcaaaaacacttccttttaacgttttcagaacattttccacaacaaaagtaggtttcctgccataataaccgccgctgcgtgacaggagtcacagtgtttttcgtcaatcgtgattttgtccagatacgtaaatctatgagccttgtcgcggttaaccaacctcaaaaaaccttactattttcggtaatatatattggctaaggagcagtgatatgcgcgttaacaatttaaccccgcaagatctcaaggcttatggtatcaacgacgtccaggatatcgtttacaatcccagctacgacaccctttatcaggaagaacttaatcctggtctggaaggctatgagcgtggcgtgttaactaacctgggcgctgttgccgttgataccggtatttttaccggtcgttcgcctaaggataagtatattgttcgcgacgacaccacgcgtgatacgctgtggtggtccgataagggtaaaggtaaaaacgataataagccgctttcccaggaaacctggcaacacctgaaaggtctggtgacgcatcagctttctggtaaacgcttattcattgttgatgcgttctgcggcgcaaatgccgatacgcgtctttccgtgcgctttattacggaagtcgcctggcaggcccacttcgttaaaaatatgttcattcgcccaacggacgaagagctggtaggcttcaaacctgactttattgtcatgaacggcgcgaagtgcaccaacccgcagtggaaagagcaagggctgaactcggaaaacttcgtggcgttcaacctgactgaacgtattcagcttattggcggcacctggtacggcggcgaaatgaaaaaagggatgttctcggtaatgaactacctgctgccgctcaaaggtatcgcctcaatgcactgttccgccaacgtgggtgaaaaaggcgatgtcgcggtcttcttcggcctttccggtaccggaaaaaccactctctccaccgacccgaaacgtcgtctgattggcgatgatgagcacggttgggatgacgacggcgtgttcaattttgaaggcggctgctacgccaaaaccatcaaactgtcgaaagaagcggagccagaaatttatcatgcgattcgccgtgatgcgctgctggaaaacgtcaccgtgcgcgaagacggcaccgttgatttcgacgatggttccaaaaccgaaaacacccgcgtctcttacccgatctatcatatcgataacatcgttaagcccgtgtccaaagcaggtcacgccaccaaggttatcttcctgacggcggacgccttcggcgtgttgccgccggtttcccgtttaaccgctaaccagacgcagtaccacttcctgtcaggtttcaccgctaaactggccggcaccgaacgcggcgtcaccgaaccgacccccaccttctccgcctgcttcggcgccgcgttcctgacgctgcacccaacgcagtatgctgaggtgctggtgaaacgtatgcaggcagcaggcgcgcaggcttatctggttaacaccggctggaatggcaccggcaaacgtatctccatcaaagatacgcgcgcaattatcgacgccattctgaacggttctcttgataacgcggaaaccttccgtctgccgctgttcgatctggcgatcccgactgaactgccaggcgtggatacccacattctcgacccgcgtaacacctacgcgtcgccggaacaatggcaggaaaaagccaccgcgctggcgaaactgttcattgagaacttcgagaagtatacggataccccggcaggcgaagcgctggttagcgccggaccgaagctgtaaggaacaggccggatggcggctttgaacggcgtcatccggcgttgagaagaaagggagggtaatacctccctttcttatgcctcttttgtcgtcccctggacgcgagccacaggaaccggtagccaggcgcgaatcgacaatccgccacgctcgctggtgccaatctccagcatcccgttatggttatcgataatgcgctgcacaatcgccagccccagccctgtgccgctggtgctacgggcgctgtcgccacgcacaaaaggctggaacagatgtttacgctgctccggcttaatgcccggcccgtcatcttctacctgaaaccaggcgcgatgcgactcggtgccgctgctgaccttaatccagccgttgccatagcgggcagcattgaccaccatattcgccaccgcgcgcttaatcgagagcgggtgcattttcacctggatgctgcctgcctgaagcgcagtgttaatctcacgctcatagccgctttccgccgcaatcacctcgcccagcacggaattgagatccgccatctccattggcatttcctgaccggtacgcagatagtcaataaactgttcgataatggcgttacactcttcgatgtctttattgatcgactccgcgagataaccgtcttcctcgcccatcatctccgtcgccagacgaatacgggtcaacggcgtgcgcaagtcgtggctgacgcccgccatcaatagcgtacggtcatcggccaattgcttcacgccggctgccatatggttaaacgcccgggtcacagagcgcacttcagaggcgccatattcacgcagcggcggcggaataattcccttccctacctgcaaggcggcatgttcaagatccactaacggtcgattctgtatacgaataaacagccacgcgccgcctatcgccaggagcatgatcgccagcgtgtaacggaaaagcggagaaaaatcgccctgatgaatctcggtcagcggcacgcgcacccagatattgggcgacagccaggttttgagccacacgacgggcgagcttttgttgacctcaacgcgcacttccgtcgggccgcctaattgctgcgccatctggtggcttaagaattcgtagtgttgcgcccaacgcaacccggcctcttcggcggcttcgttggtgtagagagagatccccagctcgcgatagatttcccggcgaaacgcaggcggcacgactaactgcgtgccgtcctccagttgcagcttatcggtcatcagcatacggacttcgtaagccagaaccttattaaactgctggaggctcggcaaaatcgcgaagttcagcaccaccaggtaggtcgtcaccaggctgacgaacagcaaggtgacgatgagcaacagcgtgcgggcaaatgaacttcgcggtgagaagcgcattcgcctcatgctttagaaccgtccggtacaaagacgtagcccaggccccagacggtctgaatataacgcggatgtgccggatcttcttccaccatacggcgcaggcgggagatctggacgtcgatggagcgttccatcgcggaatactcgcggccacgggccagattcatcagcttatcgcgagagagcggctcgcgcggatggctgactaacgctttcagtaccgcaaactccccgctggtcagcggcatcggttcatcttcacggaacatctcgcgcgtaccgaggttcagtttaaacttaccgaacgcgataacggcctcttcctgcgacggcgcgccgggcagttcgtttgcctgacgacgtaacacggcgcgaatacgcgccaacagctcgcgcgggttaaacggtttaggaatgtagtcatcggcgccgatttccagcccgacgatacggtcaacctcttcacccttcgccgtgaccataatgatcggcattggattactttgactacgcaggcgacgacaaatcgacagaccatcttcacctggcagcattaaatccagtaccatgagatggaaagattcacgggtcagcagacgatccatctgctcagcgttagcgacgcttcgaacctggaagccctgctcggtcagataacgttccagtagcgcccgcagacgcatatcgtcatcaaccaccagaatcttataattctcttgcattgtctgtactcccaaaggttcgcaacaaatgtaagtgtgtattcttaaaaaagctcacgtgagtcaccagcaaattctggtatgaatttcaggctaaattgttacaaagcatatttaacagcagcttaaatatacaattaatcggcaaccccattatttattctgtcgggacgatcacgttataccccgtgtgcgcaatatcgacagcaaaggtaaatcaacgagatgaaaacgcccctgatcacccgcgaagggtacgaaacactcaaacaagagctcaattatctctggcgtgaagagcgcccggaggtcaccaaaaaagtgacctgggctgcgagtctgggcgaccgcagcgagaatgccgactatcagtataataaaaagcgcctgcgtgagatcgacagacgcgtcagatatctgaccaaatgcatggaaaatctcaaaatcgtggattattccccgcagcaggagggcaaagtcttcttcggcgcctgggtggaaattgaaaatgatgacggcgataggctgaagttccgcattgtcggctacgatgaaattttcggacgtaaggattacatctctatcgactcgccgatggcgcgggcgctactgaaaaaagaagtgggcgatctggcggtggtcaacacccctgtcggcgaagcaaactggtacgtcaatgcgatcgaatacgtcaaataagacaagaagaatcctaagcccccgctgatggctggcatttttgccagccaatccgtataactatcccctgatttttatcctgaagacgaagctaacccatgatgaatgattctttctgccgcattattgcgggtgaaatccaggcaaatgccggacaggttgaagctgccgttcgcctgcttgacgaagggaacaccgtgccgtttatcgcacgttatcgtaaagaaatcaccggcggtctggatgacacgcagttgcgtaacctggaaacgcgtctgggctatctgcgtgagctggaagacaggcgtcaggccatcctcaagtccatttccgaacaaggcaaactgaccgatgagctggctggcgccatcaacgctacgttaagtaagaccgagctcgaagacctctacctgccctataaacctaaacgccgcacccgtggacaaatcgccattgaagccggccttgagccgctggccgatctgctctggaacgagccgtcccacgatcctgacgtggaagcggcaaagtacattgatggcgacaaaggcgtggcggacacgaaagccgcgctcgacggcgcacgctacattctgatggagcgctttgccgaagacgccgcattgctggcgaaagtacgtgattacctgtggaagaacgcccatctggtcgccaccgtcgtgagcggcaaagaggaagaaggggcaaaattccgcgactatttcgaccatcatgagcccattgctaacgtcccgtctcaccgtgcgctggccatgttccgtggtcgtaacgaaggcattctgcaactttcgctcaatgccgacccacagtttgatgagccgccgaaagagagctactgcgagcaaatcatcatggaccatctcggcctgcggctaaataacgccccggcggatagctggcgcaaaggcgtagtgagctggacgtggcgtatcaaagtcttaatgcacctcgaaaccgaactgatgggcaccgtgcgcgaacgtgcggaagacgaagcgattaacgtgtttgcgcgtaacctgcacgacctgctgatggcagcccccgcaggcctgcgcgccacgatgggccttgatcctggcctgcgtaccggcgtaaaagtcgctgtcgttgacggcaccggcaagctggtggcgacggataccatttatccgcataccggtcaggcggccaaagcggctaccgtgatcgccgcgctgtgcgaaaaataccacgtcgaactggtcgcgattggcaacggtacggcctcgcgtgaaaccgaacgcttctatctcgacgtacaaaaacagttcccgaacgtgacggcgcagaaagtgatcgtcagcgaagcgggggcgtccgtgtattccgcttctgagctggcggcgcaggagtttccggatctcgacgtctccctgcgcggcgcggtctctatcgcgcgtcgtctacaggatccgctggcggaactggtgaaaatcgatccgaaatccatcggcgtcggccaatatcaacacgatgtcagccagacccagttggcccgtaaactggatgcggtggtcgaagactgcgtaaacgccgtcggcgtcgatttgaataccgcctccgtgccgctgctgacccgcgtcgcgggcttaacgcgcatgatggcgcaaaacatcgtcgcctggcgcgatgagaacggtcagttccagaaccgccagcaactgttgaaggtgagccgtctggggccgaaagcgtttgagcagtgcgcgggcttcctgcgtattaaccacggcgataacccgctggatgcgtccaccgtccacccggaagcctatccggttgtcgaacgcattctggcggcgacgcagcaagcgctaaaagatctgatgggcaacagcaacgaattgcgccacctcaaggccgctgattttaccgacgataaattcggcgtgccgaccgtgagcgatatcatcaaagagctggaaaaaccgggccgcgacccgcgtcctgaatttaaaaccgcgcaattcgccgatggcgttgaaaccatgaacgacctgctaccggggatgattctggaaggggcggtcactaacgtcaccaatttcggcgcgtttgtcgatatcggcgttcatcaggatggcctggtccacatctcttccctgtcgactaagttcgtcgacgatccacacaccgtggtaaaagctggcgacatcgtgaaggtgaaagtgctggaagtggatctgcaacgtaagcgtattgcgctgacgatgcgtctggacgaacagcccggcgaaaccgccgctcgccgcggcggcggcgccgatcgcgctcagggcaaccgcccggcatcaaaagcggcgaaaccgcgcggtcgtgacgcccagccagccggtaacagcgccatgatggacgcgctggcagccgcaatgggaaaaaaacgctaatcgggtaatacgcaggccgggttacttcttatccggcctgcgattttgcaatacgtccaaccctttcttttttaattaacaattaaatcttacccattagaatctgttaattaatttccttctgctatccgcactattaattatcactttattaacagatgaaaccttaattaaacattaaaaacggtgaatatttgcacattagaggtatttgcaaaaagacaaataaatgttgagccatatcaacatcggcgcaaattatcgcttatttgtacattccgtcacattttaatcgttgaagatagaaaccattctcattatcattgtgttgttgattatttactctttccttcgttggctaaacatcgggtctcctgccgcccccctgagcgccgcatgaggtatacatccagttagtaagaaacaagtaggtcgtatgcaattcactcctgacactgcgtggaaaatcaccggctttgcgcgtgaaatcagcccggcgtatcgtcaaaaactgctttcgctcggcatgttgcccggctcttcatttaatgtcgtccgcgtcgcgcccttaggcgatccgatccatatcgaaacacgacgcgtgagtctggttttgcgtaaaaaggatttggcgttaatagaagtggaagcggtttcctgttaatacagtgagtctataaaaatgaaaaaattaaccattggtttaattggtaatcctaattccggcaagaccaccttatttaaccaactcaccggcgcgcgtcagcgcgtggggaactgggcgggcgtcaccgtcgagcgtaaagagggccagttcgcgacaactgaccaccaggtcacgctggtagatttacccggcacctattctctgacgaccatctcgtcacaaacctctctcgacgaacagatcgcctgccactacatcctgagcggcgacgccgacctgttgataaacgttgtggacgcctccaatctggagcgcaacctctatttgacgctgcaactgctggagctgggtattccctgtattgtcgcgctcaacatgctggatatcgccgaaaaacagcaggttcgtattgatgtcgacgctctgtccacgcgtctgggttgccctgtcgtaccgctggtatcgactcgcggtcgcggtatcgaggcgctgaaactggccattgatcgtcacaacgctaacgacaacgtcgaactggtgcattatgctcagccgctgctgcgcgaagcggatttcctggccgacgcgatggcccaggagatgcctttacaacagcgccgctggctgggtctgcaaatgctggagggcgatatctacagccgggcttacgcaggcgaggcggcgcaaaacctggatacctccctggcccgtctgaaggacgaaatggacgacccggcgctgcatatcgccgacgcccgttaccagtgtatcgccgctatttgcgacgtggtcagcaataccctgacagccgaacccagccgcttcaccagggcggtcgataaaattatcctgaaccgcttcctcggcttaccgatttttttgttcgtgatgtacctgatgttcctgctcgccattaacatcggcggcgcgttgcaacccctgtttgatgccggttccgtcgccatctttattcatggcattcaatggattggctacacgctgcacttcccggattggttaaccatcttcctggcgcaaggtcttggcggcgggatcaataccgtcctgccgctggtgccgcaaatcgggatgatgtacctgttcctctccttccttgaagactccggttatatggcgcgcgcggccttcgtcatggatcgcctgatgcaggcgctgggactaccgggtaaatccttcgtgccgctgattgtcggcttcggctgtaatgtaccttccgtgatgggcgcccgcacgcttgacgctccgcgcgaacgcctgatgaccatcatgatggcgccgtttatgtcctgtggcgcgcgcctggcgattttcgccgtctttgccgccgccttcttcgggcaaaacggcgcgctggcggtcttctcgctgtacgtgctgggtattgtcatggcggtattaaccggcctgatgctgaagcataccattatgcgcggcgaagcttctccgtttgtgatggagctgccggtttaccacgtcccgcatatcaagagcctgatcatccagacctggcaacgcctgaaaggttttgtactacgcgccggtaaagtcattatcatcgtgagtattttcctgagcgcgtttaacagtttctcgctgagcggcaaaatcgtcgataacattaatgactccgccctcgcctctgtaagccgggtcatcacgccagtctttaaaccgatcggcgtccatgaggataactggcaagcgaccgtgggtctgtttacgggcgccatggcgaaagaagttgtcgtcggtacgctgaacacgctctacaccgccgaaaatattcaggacgaagcgtttaatcctgccgactttcacctcggcgatgaactgctgggcgcggttgacgatacctggcaaagcctgaaagacacctttagcctgagcgtactggctaatccgatcgaagcaagtaaaggcgacggcgaaatggcgaccggcgcgatgggcgtgatggatcaaaaattcggcagcgccgcggcggcgtacagttacctgattttcgtcctgctttacgtaccgtgtatctcggtaatgggcgctatcgcccgcgagtccagccgcggctggatgggcttctccatcctgtgggggctgaatatcgcctattcgctcgccacgctgttctaccaggttaccagcttcagtcaacacccgacatacagcctgatctgtattctggcagtgatcgtctttaacgttgtggtgttaagcctgttacgccgcgcccgcagccgtgtagacattgaactgctggcaacccgcaaaaacgtcagttcctgttgttcgggcactgcgggcaattgtcactaagggatgtaaaaaatggcttcattgatacaggttcgcgatctactggcgctgcgggggcgtatggaggcaacgcaaatcagccatacgctgcacgctccgcagcccatgatcgacgccatgctgaatcaactggagatcatgggtaaagcggtacgtatcccggaagaaccggacggctgcctttcaggcagctgtaaaagttgtccggaaggtaaagcctgcctgcgcgaatggtgggccttgcgttaaccttcgtcgggtagcgacgtaacgcgtcttatccggcctttatcccgcgttatgttgcccggtacgcgtcacgctgccgggcaattttgcgtcatgccttccacaaagatgaaagcgttaccgccgtgcgcatttatctccccacgcgcctcgcaagcgcactaatcctctactgcaatcagcccggtctgcgcgtagtgtcacgccattgaacttcaccgatgacggatcgatatggcgacctcaacaacatccacgccgcatgacgcggtattcaaacagtttttatgccaccccgatactgcacgggattttttggaaatccatctcccgtcgacattacgtcaaatctgtaatctgaatacgttacggctggagtccggtagctttattgaagaggatttacgcccccattattccgatattctttggtcgctggaaacaagtgaaggtgaaggttacatttacgtggttattgaacatcagagtacgccggacgcgcatatggcatttcggctgatgcgttacgcaatggctgcaatgcaacggcacctggaggccgggcataagacgttgccgttagtggtgccaatgctgttttatcacggaaaccgcagcccgtatccgttctcattatgctggctggatgaatttgccgacccggtgatggcgcgtaagctatacgccaccgcctttcctctggtcgatattacggtcgtgccggacgacgagattatgcgacaccgacgggtcgcgctgctggaactcatacaaaaacacatccgccagcgtgatctgatggggcttgtcgaacagctggtcgccctgctggttaagggatacgctaatgacacccagcttcaaagtttgtttaattacatgatgcacactggcgacgccgcgcgcttcaatacgtttatccgccaggtggctatgcgtatcccacagcataaggagaagatcatgactatcgcagacagattacgtcaggaaggacatcgtaacgggttacagcaaggcaagcaggaaggccaacggctcgccgcattgcgcattgcccgctccatgctaaacgatggtttcgatcgcgataccgtgcttagggttaccgggctggcgcctgccgatctggcgtctgaaaaccattaatctggcagaatggtccgggcccggcaacgccctggttacagcgatgattttagcgtcatcagcgcctgacaaaacgccgccggatgcgagataaacggcgcatgggccgccttcgccattatctgtgatgtactgtgcggccataacgtatcgagcaaaggcacgattttacgcggcaccagaccgtccagataaccatacaaacgcaaaaacggcatgttcacatttttaagcgcttctcgtagatcgaccgtttttaagatttccagtccgccattgagcacctctacatccggcataggctgcgccagcaccacgctttttaaggtgcgggcatcctgacgcgccgtctccgtccctaacgtttgcagcgccagaaaacgctccaccgtgcgctgaaaatcgtcgctaagctgctgctggaatccgccgaggatttctggttttattcccggccacccctcacgcgcgctaaagcatggcgaagaggcgacagtcaccagcgcctggacgcgttcagggtgggtgagcgccatctgactcgccaccaggccacccaggctccagccaagccagatagcctggtccggcgcgtttttcgctacctgcgccgtcatctcttcaagcgtcatggcgccaaaccccgagctgcgaccatagcccggcaagtcgaccagatgcagcgtaaaatgcgagccgagttcctcgcgaatgcaatgccatacctccgcgttcaatccccatccgtgcagcagcacaagatgacaatttccctcgccgtaggtctgccaccagatgtcattcatcagttactgttctcttttgtctaacaaggatgcacctatgctaacagtaccgggattatgctggctatgccgaatgccgttggcgttaagccactgggggatttgttccgtatgcgcgcgcgctgttcgtcagcgcgtcagcctgtgtccgcaatgcggattacctgccgcgcatccttcgctcccctgcggtcgctgcctgcaaaaacctccgccctggcagcgtctggtgagcgtcagtgactatacaccgcccttgagtttactggtgcatcagcttaaatttacccgccgcagcgaaattgccgccgcactggcgcgtctactgttgcaggaagtcctcatggcgcgccgcagcactggcttgcagcttcccgacagaatcgtcagcgttccgctctggtcgcgccgacactggcggcggggatttaaccaaagcgatctgttatgccaaccgttagcgcactggctgggctgcgcgtgggacagccagaccatcacgcgggtacgggcgaccgcaacacaacatcatctcagcgccaggttacgtaagcgcaatttgaaaaacgcgtttcgccttgaattgccggtacagggtctccatatggttattgtggatgatgtcgtcactaccggaagtaccgtcgcggaaatcgcgcaactgcttttgcgcaacggcgcagcgactgtccaggtatggtgcctgtgtcgaaccttgtagagcctcgatgatgggcgtattataaccaactaaaatagtcaactattaggccattactatgatccgtatttccgatgctgcacaagcgcactttgccaaactgctggcaaatcaggaagaagggacgcaaatccgcgtatttgtcattaatcccggcactcctaacgcagagtgcggcgtttcttattgtccgcccgacgccgtagaagccaccgatactgcactgaaatttgacctgttgaccgcttatgtcgacgagctgagcgcgccctatctggaagacgcggaaattgatttcgtgaccgaccagctaggttctcaactcacattgaaagcgccaaacgcgaagatgcgcaaagtggccgatgacgcgccgctgatggagcgcgtggaatatgctctgcaatcgcagattaacccgcagttggcgggccacggcggtcgcgtctcgctgatggaaattaccgatgaaggctatgcaattctgcagtttggcggcggttgtaacggttgctcgatggttgacgtcacgctgaaagaagggatcgagaaacagttgctgaatgaattcccggaactgaaaggggttcgcgatctgaccgaacaccagcgcggcgagcactcatactactaagattttccccgcatccatgcccgatggcgcttgcgcctgtcgggccttgtcagccccaccgtaggccgaataaggcgtctacgccgccatccggcgctatcaaccacatctcataacaatggcccttcttctttcgccgataacatgacctgtgtctcataatttaaattttgcctgccagggtcattttcaacacccatatgttacccgtatcattcttatgggcacctaacatccatataacatctgactacgctcattcgtttcaacggtaatcagtattggtgctattgcgactctgttcccgtcgggaacaacaggaatttgtcgtcgaaacaatgacgttacccataacaaagtaaaggccaggtaaatcatgccattagtcatcgttgctatcggtgttatcttgttacttcttctgatgatccgcttcaaaatgaacggatttatcgcccttgtcctggtagcgctcgctgtcgggttgatgcagggaatgcctctggataaagtcatcggctccatcaaagccggtgtcggtggtacgcttggcagtctggccctgattatggggttcggcgccatgctgggcaaaatgcttgccgactgcggcggcgctcaacgtatcgccactaccctgatcgcgaaatttggtaaaaagcatattcagtgggccgtagtgttaaccggctttaccgtcggcttcgctctgttctatgaagtgggcttcgttctgatgctgccgctggtattcaccattgccgcagcggcgaatatcccgttactgtacgtcggcgtgccgatggccgcggcgctctccgtcacacacggcttcctgccgccgcacccgggtccaaccgcaatcgccacgattttccatgccgatatgggtaagacgctgctgtttggtacgattctggcgatcccgaccgtgatccttgccggaccggtttacgcccgtttcctgaaaggcatcgataagccgatcccagaaggcctgtacagcgcgaaaacttttacggaagaagagatgccgggctttggcgtcagcgtctggacgtcgctggttccggttattctgatggcgatgcgtgcgattgccgagatgattctgccaaaaggccacgctttcctgcccgttgccgagttcctgggcgacccggtaatggctacgttaattgccgtactgattgcgatgttcacctttggcctgaaccgcgggcgttccatggatcagattaacgatacgctggtctcttccatcaaaattatcgccatgatgctgctgatcatcggcggcggcggcgcattcaagcaggtgctggtcgatagcggcgtggataaatacatcgcttcaatgatgcatgaaaccaatgtctctccgctgttgatggcgtggtctatcgcggcggttctgcgtatcgcgctgggctctgcgactgtcgcggcgattaccgcaggcggcattgcggcgccgctgatcgccactaccggcgttagccctgaactgatggttatcgcggtcggttccgggagcgtgattttctctcacgtcaacgacccgggcttctggctgttcaaagagtatttcaatttgactatcggcgagaccattaaatcctggtcgatgctggaaacgatcatctccgtctgcggcctgatcggctgtctgctgttgggtatggtggtttaagcgaggcggcttgtaggccggataaggcagcaatgtgcgccaggattgcctgatggcgctgcgcttatcaggcctacgtgctctcaacataataaagccggggaaatccccggctttattatttcttcttcgcggccgcttttcggcgtttatccaaatccttaatcagcttgtttacgccctcatcggcaaacatctgctccagcgtggcagtgagcttccgtcgccagtttttatactgatcgctggtgcccggtacgttaaccggatcggccatatccagccagtcctccggctgaagccccaacagaccgctgttactgtcggctatgtagcgctgaagcccgcgatttagcgttggcgtcatcgacattaacgatgccttatgcccggcgcgttttggcagacaaccatatttatgcagcgcgtccaatagcccctgtttcgcccgctcgcgatcctcatacagcccgcgcagaatcacttcatccggataaagccccaaagctttacccaacgtcaggtcaccgcattcccaatagccgcgcagcgtggggagatcgtgcgtcgaggcgacagccatcgattgttgcggatatgcgcccggcgcgcggaagtttttctcaaggtcattttcaaaccacagcactttataagaatagaccccgctatcgcgcagcttgccgacaatctcaactggcaccgtccccagatcttcgcctatcaccatacagcggtgacgttggctctccagcgccagaatagaaagcaaatcatctaccggataatggacgtaagccccctgatccgctgtttcgccatacggtatccaccacaggcgcagcaacgacatgacatggtcaatgcgcaacgcgccgcagttttgcatattggcgcgcagcaggtcgataaagggctcatacgcccgggcgacaatgatatgcgggtccatcggcggcagcccccagttctgaccgagcgggccgaggatatccggcggcgcgccgacagatgctttcaggcagtacagctcccggtcgcaccaggtttccgcgccgccttccgctacgccaaccgccagatcgcggtacagaccaatcggtagtttaaaactctggcaggtatcccagcaggcggcgaattggcgccaggccagccactgaagccagaggtaaaactccacctcttcgcggtgcgcttcacagaattgttttaccgcgggatactctaccgactggtacgcctccggccaggctggccagccccagcgctgctcatcctcttttacctgatacgcatgcagcgcgtcgaatgccgcctgccagtaaaggctctcgccttcgcgggcgataaagtgacgaaactccgccatttgcgcatcgtcgcgagcggcaaaccgcgtccacgccatccgcagcgccgtgattttcagcgcggtaacggtagcgtaatccacccattgcgcatcgcgcgcctgtcgcagcttttgctgtgtggcgggcatttgccaccatgcctgcgcctcttcgctcaggcggaaatcttcgacggcgttgacgtcgatatatatcacgttcagccagcgacgagacgaggggctgtagggactggcgctctccggattcgccggataaagcgcgtggatcggattcaggccgataaacgcgccgccgcgtgtcgccacgtcgaccagcatcgacttcaaatcgccgaaatcgccaataccccagtttttttctgaacgcagagtataaagctggacgcaggccccccacagttttttcccttccagcagcgcctgcggctcatagcatcgcggcggggcgacgataatacggcagtgcgtacgctgttcatcctgggtcaacgtcagggtgtggtagccctccggcaatgtagccggaaggttaagttttttaccgcccgtcacgcgccctttgtaatgcacgccctcttccgtagtcagcagccaggcaaactcaccgcgcccctctaccggcaacgccatttttttacccgcggtataaaccttcacattcggcacgaccgcctgtggtcctgttgtcgtgccgtgcatcgccgccagcaaacgtctcttggtttcagcgccaatagactgcggtttgccatgagcattgatgtaactggggctgatccccgccgccagcgcggcactatcgagacgtttattttccatcgcgctcccttagcgttttgcctgccagatacgggcctgataatcgcgaatagagcgatcggaactgaacataccgcagcgcgcggtattgaggatcgcggcgcgcgtccacgcttcctggtcacgatacagcgcatccacctgcttttgcgcctcgacataagcggcgaagtccgccatgaccaggtacggatcgcccccctgtttgccgaggctatgcagcatctggtcaaaggcatgtttatcgccatcgctgtattgaccgctttccagctcttttagcaccgcatccagcactttgtcttttttacgccatttcaccggatcgtagcctttggctttgagcgccttgacctcttccacagtatggccaaagataaagatattctcttcacccaccttctcagcgatttcaacgttagcgccgtccagcgttcccacagtcaacgccccgttcagcgccagtttcatgttgccggtgccggacgcctctttcccggcggtagaaatttgctcggaaatatccgccgccggaatgagcatttccgccgccgagacgcagtaatccggcaggaaaaccaccttcagcttatcacccaccgccgggtcgttattaatggcttccgcaaccttattgatagcaaaaatgatgttcttcgccaggtaatagcccggcgccgccttcgcgccaaacaggaatacgcgcggtacgcgatcagcctgcgggttttcgcggatctctttgtacagcgccagaatatgcaacagattcagatgctgacgcttgtactcgtgcaggcgtttgatctgaatatcaaaaatcgcgttgcttgaaatctcaatcccggtacgggccttgatgaatttcaccagccgttctttgttcgcccgtttgatgtcgcgatactgctgacggaatttggcgtcgtcagcgtatttttcgaggttgatcaactggtcgagatcgttagcccactcttttttcagcgttttatccagcaacgccgcaagctgcggattgcactgtttaatccagcgacgcggtgtaatgccgttggtgacattgtggaatttgttcggccaaagctggtgatattccgggaacagatctttcaccaccagatcggagtgcagcgccgccacaccgttcaccgcaaagccgctgaccacgcacatattggccatgcgcacctgacggtcatgcactaccgccagttttgcccatacctgcttatcgccaggccaggtgttatcgaccagcgtcttaaagcgatcgttaatctgcttgataatctgcatatgacgcggcaacagcgctttcaccagcttctcatcccagcactccagcgcttctggcatcagggtgtggttggtgtaggcgaaggttttgctggtgatagcccaggcgtcatcccagctcagttggtgctcgtcaatcagcacgcgcagcagttccggaatggcgatggtcgggtgagtatcgttcaattgaatgacctcgtaatccgccagctcatgcagtttgcgtccggccagatgatggcgacgcagaatatccgctaccgagcaggcgcactggaagtattgctgcatcaggcgcagttttttgcccgccgtgtggttatcgttgggataaagcaccttcgtcagtttttccgcatcgataccctgctgttccgcccgcaggaaagcgccgtcgttgaatttggtcagatcaaacggatgcgcgtgggtcgcctgccacaaacgcagcggttgcgcgacgccgttacgatagcctaacaccggcagatcccaggcctggcctgtaatcacaaaacctggctcccagcgcccttctttggtgactttaccgccgatcccaacctggacgtccagcgcctcgttgtggcggaaccacggatagctgccgcgatgccagtcatccggcgcttccatctgcttgccctcaacaaatgactgacggaacagcccatactggtagttcagaccatagcccgtagcggactgcccgacggtggccatcgaatcgaggaagcaggcggccagacgtcccagaccaccgttgccgagcgccggatcgacttcctcttccagcagatcggtcagattaatatcgtgcgctttcagtacatcgctaacgtcctggtaccatcccagatttaacaggttatttcccgtcaggcggccaatcaaaaattccatcgaaatgtagttcacatgacgctggcctttcgtcggctgcgctaccggttgcgcgctcagtaattccgccagcgcgccgctaacggcctgccaccactgacgaggcgtcatgtcggacgccgacagtaaaccgaaacgctgccactgacgcgtcagggcggcctggaattgatctttattgaaggttggctgtgacataggaaatccgtcctcgggtaataaaacaacgttatcgctagtttgccaggctcgatgttgaccttcctcctcccggcaatgattagggagggaggaggagcggggatgagcataaaagtgtgatcgccgccacttacccctgtataaacgcgccgattcctgtcaacgacacccagtgttacgcataatcaaatgaataaacagaaataacagtaaatcgcgaaggggtattttcgaagattatatgaacgccgaaatagtttcttacctgaaatattcagcagcgggaggttcactaacttaacataattaattaaacgcctggtatcgccattgtgttaaatccggatgatgtccaggacattatttacaataacggaaatatgacctcagcccagctctgacgctcgtttcaaccgcgccgaatacttttttaataccgttatttagaattgtgacagagtgcaaattcagacacataaaaagtctgcttagcttgcattaaaatgctttctggccgaccttatatctattaattacgaagcgcaaaaaaaatcgcagttccccccatttcccacagtgaagtgattgctatgttgattccgtctaaattaagtcgtccggttcgtctcgaccataccgtggttcgtgagcggctgttggctaaactttccggcgcgaacaatttcaggctcgccctggtaaccagtcctgctggctatgggaaaaccacgcttgtctcacagtgggcggcgggcaaaaatgaattaggctggtactctctcgacgaaggcgataaccagcaagagcgattcgccagttacttaattgccgctatccaacaggccactggcggacactgctcgaccagcgaagcgatggcgcaaaaacgtcagtacgccagcctgacgtctctcttcgcacagctctttattgaactggcgcagtggcatcgcccgctttatctggtgattgacgactaccatttgattaccaatccggtgattcacgacgcgatgcgctttttcttacggcatcagccggaaaatttcaccctggtggtattatcgcgtaatttgccgcaactgggcatcgctaacctgcgcgtgcgcgatcagctgttggaaatcggcagccagcagttggcttttaaccatcaggaagcaaagcaattttttgaccgtcgtctttcgtcgcccattgaagccgctgagagcagccgcatgtgcgacgatgtggcaggttgggccactgcgctacagttgatcgccctctccgcgcgccagaaccatacctctgcgcatcactccgcccgccgtcttgccgggattaatgccagccacctttctgattatctggtggacgaagtactggataacgtggatgtcagcacccgacattttttacttaaaagcgcgatcttacgctcaatgaatgacgcgttgattgtgcgcgtgaccggcgaagaaaacggccagatgcggctggaggagattgagcgccaggggttattcctgcaacgcatggacgacacgggcgaatggttcagctatcacccgttgtttggtagctttctgcgccagcgttgccagtgggaactggcggcggaactgccggagatccaccgtgcggccgcggaaagctggatggaacaaggttttcccagcgaagctatacatcatgcgctggcggcgggtgacgcgcaaatgctgcgcgatatcctgcttaaccatgcgtgggggctgtttaatcacagtgaactggcgctgctggaagagtcattaaaagcgctgccgtgggaaagcctgctggaaaatccgcggctggtgttgttacaggcctggctgatgcaaagccaacaccgctacagcgaagtgaatacgctgctggcgcgcgccgagcaagagatcaaaggggtcatggacggcacactgcatgctgaatttaacgcgctgcgcgcccaggtcgccatcaacgacggcaatccggaagaggctgagcggctggcgaaactggcgctggatgagcttcctctcgcctggttttatagccgtattgtcgcgacctccgttcacggtgaagtgctgcactgtaaaggcgatctcagccagtctttatcgctgatgcagcaaaccgaacaaatggcgcgtcatcatgacgtctggcattacgcgctgtggagcttaattcaacaaagcgaaattcagttcgcccagggattcctgcaggccgcatgggaaacgcaggagagagccttccagttgatcaaagagcaacatctggaacaactgccgatgcatgagtttctggtacgtatccgcgcgcaattgctgtgggcgtgggcgcgccttgacgaagcggaggcctcggcgcgcagcggtatcgctgtgctgtccaccttccagccgcaacaacagttgcagtgcctgacgttactggtgcagtgctcgctggcgcgcggcgatctggataatgcccgtagtcagcttaaccgactggaaaatttattaggcaatggccgttatcactgcgactggatctctaacgccgataaggtgcgtgtcatttactggcagttaaccggcgacaaaaaatccgccgccaactggttacgtcatacgcccaaaccggcgtttgccaataaccattttctgcaagggcaatggcggaatatcgcccgcgcgcagatcctgctgggcgaattcgagcctgcggaaatcgtgctggaagagttaaatgagaatgcccgtagcctgcgcttaatgagcgatttaaactgcaatctgctgttactcaatcagctttactggcaatccgggcggaaaaacgacgcccagcgcgtattgcttgatgccttacagctcgccaaccgcaccggatttatcagccattttgtgattgaaggcgaagccatggcgcaacaattgcgtcagcttatccagctcaatacgctgccggagatggagcagcatcgcgcgcagcgcatcctgcgagagattaaccaacatcaccgacataaattcgcccattttgacgaaggcttcgtcgagcgcctgcttaaccatccggatgtcccggagcttattcgcaccagcccgctcacccagcgtgaatggcaggtgttagggcttatctattccggttacagcaacgaacagattgccggcgaactggcggtggccgcgaccaccattaagacgcatatccgcaacctctaccagaaactcggcgtcgcgcaccgtcaggacgcggtacagcacgcgcagcagttgctgaagatgatggggtacggggtttgaggcaaaacaggcaacgtcctggtgtgtaaatttgtttaatcataaaacctgaaagcaccggttaacatatgggcaaaaacggcgcttttaaaataaatcggcatgcgttcctgttcgttcaaatcgcaggcattcatccgttatcttataaataagaatccagtcaggctcaatatgggcatcccggtatccgctatatgaaccttgtaacgggtgatctttataaatggcaggaaggggaaaagggtggtgaatcagaagcgtcataagtgttttaagtttgccgacatccttatgacgcttttgtgcccgttttacatctttctggaactgtcccgaatattcaatttccctttgccccatagtcagatccctaactggtcaaacaaatcatcagcatctttggctttatgaatatcaacgccagcttcgctattttctatcgttcgggacgttaactcattgggtatgcgcaaatcaaaaggcaatgccttttcacgcgcaactttagtcagtgtaatccgtatcaaatcagaaatggttaaccccatttcagccaggacatctgccgcctggtccttcagcgtttcgtcgatacgggcacgaacaagcgcatttgcagccatcgattagtctcctgtactgtgtctctatacagttcaaattgtagctcaactgagacacacatacaaaccgggcccggatgtttgccttgcaatgctcgtaaagatgacttagtcgcttacccggacaagatagccactttcggttgcttcacaggaaaatctgaccggcaaaaaccgttccaccaccgcaatattggtaagcaagtgagcggaggcccgtgccacggtaaacgcgccctcgcccgccagcgccagcggtaaaatcagctggtcggccagatgctctcccaccgccgccgggcttgcgagatagcgccgcgcttcatgcgcaacctggttagctaccgcttccgcgctggtgccttttacgccgaacgcggcgaacagttcggtcagttgttcgctttgaatcatcagcgacagcgcgttgcccggcccgcagccgccttccagcgcaacgacgtttttctccgcctgcgggaagtgggcttccagcgttgcgacttcacgttcgccaacgtggtaaggaaccgccgccagcaaagcttcagcggtggtgcgcagcgtctcgccgcgcgatatcagcgtcagaccgcgtaaagacgctgccggttcgacgaccgttgccgccgcgccgccgcctgccggataaaagccgtgttttatcagcgtggtgcgctggctgatgcccatcctcgccaacagcggttcccagacgcggcagataaaatcagcgctgggcgcggcctgattatgcgtcccgccgtgaacctccacgcgggatgaaccgtcagcaaaccacagcgcgggcaggacggtttgcagcaccagcatacaactgcccgcgctgccaatcgcaaaacggtactcgccgccgcgaatcggccccggcgtaaaacgcaactgttgcgagcccagctcgtcgccgttcacctgcgcgccgcagatttccgttgccgctcgcaccgccgttaaatgctggcgtagcagccccggtttagcgcgcccggcgcggatgccgctcatttcaaacggctggccggttatcattgataaactcagcgccgagcgcaaaatctgcccgccgccctctccctgtgcgccatccagcgcgatgatccttgccattttctatcctttaacgcacaccacctgccgcagggcgtacatgatttcaaccaggtcggactgcgccgccatcaccgcatcaatatctttatacgccattgggatctcgtcgatcacgtccgcatctttacggcattcgacatgcgcggtggcacgaatttgatcgtcaacgctaaacagtttcttcgctttcgttcggctcatcacacgtccggcgccgtggctgcacgaacagaacgactcttcgttacccagcccgcgcacgataaagcttttcgcccccatcgaaccgggaatgataccgaactcaccgcgccgcgccgaaacagcccctttacgcgtcacatagatctcttcgccaaagtgctgctctttttgcacatagttatggtggcagttgatctcgtccatatcgagggcgatcggtttttccacgcagcgctggagcgccgccagcgcgttttccatcatcgcctcgcggttcaggctggcgaattgttgtgcccagtgtaccgctttcaggtaatcgtcaaaatattcgcttccttcattaaaatacgccagatcgcgggacggcagcgtttctaactgctcctgcatttcttgctgcgccaggccgataaaataggtgccgatggcgttaccgatcccgcgcgaaccggagtgcagcatgatccatacccgatcggtttcatccagacagatctcaataaagtggttaccggttcccaacgttcccaggtgcttatagttattggtattcaaaaagcgcggatatttttgcgttaaccactgatatcccgcttccagttgcgcccatttttcattaacgttggcgggcgggtttccccatgcgcccacatcgcgatgcccgcgtccggtggtacgcccgtgaggcacagcggcctctatggcgctacgcagatccgccagattttccggcagatcggccgccgttaagctggtacgcagcgcgttcattccacaaccgatatccacgcccaccgccgccggaataatcgcccctttcgtcgggatcacgctaccgatggtcgatcctttccccaaatgcacatccggcataacggcaatatgtttgaaaataaacggcattttcgccgtattgatcagctgctgacgggcatcgtcttctaccggtacgcctttggtccacatttttaccggtgcgttctgggtggtcattaattcgtaattcatcatttttttctcgttttaatcattagggtggcgacaagtttatgtgaatacaccgctctaccattgagctacagagccgggctctgacgggtctcgaacccgcaacaaatgtagatccacaggcattcgccaaaatagggtggcacgacaagttaaggtgaatcacccgctctaccgttgagctacagggctaagccccggcagggttcgaacctgcgtctggccatacaaggtgtagatccaccagcatttgtgccttcagcgttgcgcgacaaattcatagccgggatgatacgcatcgggaaagatgtaatcccggccagcattcgcgccgcgctgaatactctttacaacgtcacggcttcaatctcttccagccagtgcgcgctgccatagtgaccgttaacaaagttatctatcaccgtaaacacctcgtcgctgaagccgccgacgttcaaaatatcgcttcgttccgccgcctgggtggtgccgtaaggcagcagatcgatacacaccaggcgcgcctgcgggttgcgctttttcagttcgatccagcattccatggtggccgttgagccatggcgcgatttatcaacccacgattcgttatccgacaccataatcaccagatccacccgcgcccgctcgttcaacaacctacgcagcggcgcggagcagttggtgccgccgccgccaaccgccgccagcttttgcgcgttgtgcatgaccgactggcgcgcatcaagccgcacgtcgaccacatcgcattcaaacggcagcacgcgggcctgcggatgattacgcagcacggcggcggcgatcagcccggcaacgtccacgcagcggatcttactggtctcccccttgcgatagccggttatcgacgacttcatcgaccccgacacgtccgggcagaccaccacattgccgcgaaacggcggaatgttctccagcgcgtactccatcgcctgcgctaaagcctcgcgaataacctgcggcacgccgctttgcagattgctccacgccgacagcaactgataaggataaacccaggactggcgcacctgcgccctgtccgccagccgctgcgccacgctggcggcaagcgttgcattctcaaacacgtcatgacgcgccagcgtattcaaattcatccgtaacgtttgccaactcatccgctgcgccagttgcgcccactgttcgcgactcagcggcgcgttggtcagtagtaaaaacgacacatcgggtaaggccgcgcccatgtcgccttcacgaaacgccagcagcgcgcgcgttttttccggcagctgcgccttatcgcacggcttaccaatcagccaggcgaagaaggcttcctgccacgccgcctgcggccgtgggtgcaccattttgacgatatccgccagcgacggcgcattgcccaccgatgcctgcaataagcgctcttcgctggcgttctgcaaccaacgctgcaccagcttctttggccgcgtccccagcgagcgccgcccggtcacgccgctgcgcaacatttgcacaaagttacgcagcatccggccattgttgatcacccgcgtaaatactaccggcagcagcgccgaaccacgcgccgccagaatggcggtcaacagcgcgggcatatccttcatcatcccgcgttcgcggccataaatcgccagttgcgctaaaaacagatcgtcgagatctttcgccgtcgccagaacatcatttagctgcgcctggccgctggcataaaaagtctcgttcatgcagccggtcatcaccatttgcgccagtttatggcgcggggtgaaggcaaaggccgctgcgccttgctgattgctggcgttggccagcggcgcgtcccttaacagcgaacggaacaaaagtggattagccatttgtttttcccatttccgttattctccatgccatggttattgcaaccagcgtgccagaaaataaattattttttaatctattgatttttaattgatttatttctttagcgttcaagtgaaagaaaaatgcctgcacggtagtcattaaaaagcgataaaattatctcgtcttttagaaggaaatctaagatgcgaaaaacggtggcctttggttttgtcggtacggtactcgactatgcaggacgcggcagtcaacgttgggaaaaatggcgccctactttgtgtctgtgccagcaggagacgctggtcgttcaccgcctggaactgctgtacgatgcccgctctcgctcgctgtttgaaggattaaagaaggatatcgccagcgtctcgccggaaacggaagtcgtcggcgtagaaatcgcgatccgcaacccgtgggacttcgaagaggtttacgcctgcctgcacgatttcgcccgcagccatacctttcatcccgaagatgaagactatctgattcacatcaccaccggcacccacgtcgcgcagatctgctggttcctgctggcggaggcgcgctatcttccggcgcgattagcgcagacctcgccgccgcgcaaaaaagataaaccgcatagcacgggcgacgtgacgattattgacctcgacctcagccgctacaatgatatcgccacccgcttcgcccaggagcgggaggagacgctcaacttcctgaagtccggcattgcaacccgcaacccgtgtttcaaccggatgattgagcaaattgagcgcgtcgcgatacgctcccgttcgccaatcctgctcaatggcccgaccggcgcgggcaagtcgtttctcgcccgtcgcatctatgaactaaaactggcccgccaccagttcagcggcccgtttgtcgaagtgaactgcgccaccctgcgcggcgacacggcgatgtcggcgctgttcggccacgttaagggggcgtttaccggcgcgagagaggagcgtgcagggctgctgcgcagcgccgacggcggcatgttgtttcttgacgaagtgggagaactgggcgcggatgaacaggccatgttgctgaaagccattgaagaaaaacgcttttaccctttcggcagcgaccagcaggtcagcagcgatttccagttgattgccggcacggtgcgcgacctgcgccagcgggtggcggaggggacattccgcgaagacctgtacgcgcgtattaatctctggaccttcgaactaccgggcctgcgtcagcgccaggaagatattgagccaaaccttgactacgaactggaacgccacgcggcgctaaccggcgacagcgtgcgttttaataccgaagcgcgccgcgcctggctgagcttcgccacctcgccgcaggccgcctggcgcggtaacttccgcgaactctccgccagcgtcacccgcatggcgacgctggcggacaacgggcgaatcacggtcgaaacggtagacgatgaaatcgcgcgtttgcgctatagctggaatgaccatcgcccctccgcgctcgacggactgccgggcattgacgcaacggcgctggatctgtttgaccgtatgcaactggaaaacgtcgttgcggtctgccgccaggcgaaaaccctttccgacgccgggcggcagctattcaacgtttcccgtcaggggaaagccacggtgaatgacgctgaccggctgcgtaagtacctggcgcgttttgggctgacgtgggacgttttacagaattaacacagctccagttgaatatggttctccgtcaacacctgcatcacgcccggcggcggcagggtatcggtgtagaccgcatcgaccatactaatgctgcccatgtttaccatcgcgttacggccaaatttagagtgatccaccaccagcatcacgtggcgcgaattttcgataatcgcgcgcttggtgcgtacctcatggtagtcaaattccagcaacgagccgtcgctatcaataccgctaataccgagaatgccgaaatcgagacggaactgggcgataaagtcctgcgtcgcttcgccaataatgccgccgtcgcggctacggagttcaccgccggcgaggataatacgaaaatcctctttcgccattagcgtgttcgctacgttcaaattgttggtcacgatccgcaaattactgtgccctaacagggcgtgcgctacggcttccggcgtcgtgccgatatcaataaacagcgttgaaccattggggatctgggccgcgactttgcgagcgatgcgctctttttcttccgtttgcgtcgccttacgatcgtgccacggcgtgttcaccgagctggagggcaacgccgcgccgccgtggtggcgcaaaatcatattctgttccgccagatcgttaagatcccgacgaatggtttgcgggctgacagaaaaatgctccaccagctcttccgtactgacgtacccctgtttttttaccagttcaatgatcgcgtcatgccgttgtgtttgtttcatgaataatctctgaaagtaaccaaccttgcgccggatagcggcattcgccctacccggcctggaaaaatatctcgaccacaggccggatacgcctcacgttcgttttcgcgcattcagcgtatcaacaaaggccatcgctaaaccgacgataagcccggcgatgtgcgcgccgttcgccatagacatgccaaaccagtcaaaccaaccagcgactatccacaataatgcaaaaataattaagccgcgctggaggtaaattccgctttgcggatcgcgctctccacgcagccacacgtaacccatcagcgcatagacgacgccagacagtccgccaaaccacgggccgctaaatttctgctgtacatagccgcttagcagcgcgcttatcaccgtaatgacgattaatttaccgctgcccaggcgcttctctaccgccccgccgagataccaccaccacagcaggttaaaaagaatatgcatcagtgagaagtgcataaagatatgggtgaagtagcgccagacttcaaattttaaaaccggatcgaacggccacgccagccacaccatcaccgtctgatcgccgatgagactcatcgcgatatagaccagcacgcaggcgagcatcacgatccaggtaacagggccggctcgttcacgcagcgtggcgagaaagggaaaacggcgatagcgtagcccgctgttagtctgcccggactgccagctagccgccagataacgcggatcgccgggattttctataaaccgcgccagctcgccccgcacacgttcggcctgcgattcatctgccaaccagatatcgctttgattatgttgctgaatagtaagaatgacgccctgggtggccatgtaatcaacaaatgcctgcgccacgcgaggattcgcaaaggaagtaatcatcaacattattgctgtcgcttagtccatacaaaagaagacagtatatatacccttctcgtcggaggctgcatctttatgggattacgcgccattcgcgacatcggcagggaaacggcgatgccaggcctcaaacccgccgtcaatgctgtaaaccgcatcatagccttgctggagcagatactgcgcggcgcctttactactgttgccgtgatagcacattaccatcacggcggtatcgaaaccatgctcacgcataaacgcgcccagcgtatcgttagtcaagtgaaacgcctgcggcgcatgacccatggcataactttgcggatcgcgaatatcgaccagcaccgccgcgccctggtgcagtttctgatacgcctcttctacagtgatacattcaaattgttccatgaatcgctctttcattattgccggtgaagccaattaaggcattttatcgcccagtgtacgttgacggagtagcttagcgccataatgttatacatatcactctaaaatgttttttcgatgttaccaatagcgcgtttctttgctattatgttcgataacgaacatttttgaactttaacgaaagtgcaagagggcagcatggaaaccaaagatctgatcgtgataggcgggggcattaacggtgcaggcatcgcggctgatgccgccgggcgcggtttgtccgtactcatgctggaagcgcaggatttggcctgcgcaacctcttccgccagttcgaaacttatccacggcggcttacgctaccttgagcactacgagttccgtctggtcagcgaagcgctggcagaacgtgaagtgctgttgaaaatggcgccgcacatcgccttcccgatgcgttttcgtctgccgcaccgcccgcatttacgtccggcctggatgatccgtatcggtctgtttatgtacgatcacctcggcaaacgtaccagtttacccggttccaccggtgtgcggtttggcgcagattcggtgctcaaaccggaaatcgtgcgcggattcgaatattccgactgctgggtagacgatgcgcgtctggtgctggctaacgcacagatggtggtgcgtaaaggcggcgaagtccttacccgtactcgcgcaaccgccgctcgtcgggaaaatggcctgtggattgtcgaagcggaagatatcgacaccggtaaaaaatatgtctggcaggcgcgcggactggttaacgccaccggaccgtgggtcaaacagttcttcgacgaagggatgcacctgccgtcgccatatggcatccgcctgatcaaaggcagccatatcgtcgtgccgcgcgtccataatcagaagcaggcgtatattctgcaaaacgaagataagcgtatcgtctttgtcattccgtggatggaagagttttcgatcattggcacgaccgatgtcgaatataaaggcgatccgaaagcggtaaaaattgaagagagcgaaattaattacctgttgaaggtttataacgcgcacttccagaaacaactggggcgcgatgacatcgtctggacgtactccggcgtccgtccgctgtgcgatgatgagtccgactcaccgcaggcgatcactcgcgattatacccttgatattcatgatgaaaacggcaaagcgccgctgctttccgtgtttggcggtaagctcacgacctaccgtaagctggctgaacacgcgatggaaaaactggcgtcttattatccaggcatcgggccggcatggaccaaaacgtgcgtactgcccggcggcgacatcgacggcagccgcgaagattacgcggcgaagctgcgtcgtcgttatccgttcctgacggaatcgctggcgcgccactattcgcgcacttacggcagcaacacggagtggattctcggcgaagccacgtcgctgcttgatttaggcgaagatttcggtcatgagttttacgaggcggaactcaagtacctggtggatcacgaatgggtgcgccgtactgaagacgctatctggcgtcgcaccaaagaaggcatgtggctgaccgccgaacagcagtcccgcatcacccagtggctggcggcgtatgttgagaaacaccaactttcaatggcgtcgtaataaaatccggggcggtttataccgcccttttcgccacataccgcattcactcgccgggttttgtacagccgggcatatgattagtgatacggtagcgatcgacacttatttgggtaataaagaagggttttgcccgcgcttcgctattccagagagttttccccgttttacaccagcttttatgagaaaagttggcataatgaaccacactctcctcccccagcacgctttcaaaatgcgcgcgtttatcaccgtcggccacgctaaagtcagcataaaaaagattgctgtccaggttaaacgtcatctctatttcactggcggacgatggaaagaacacaggcagccaggtccagataccggattgctcgggtatggcggcataatcaggaaaatagcttacctggcgatcatcgcaggcggtcagcacagcgatgatgattaatgctgcaccacaccggaggacctgattaatcagctcagcaacaatatctttatgccacgaagtggattcacgccgtgcaatacgaatatcagcgccgctggccgggtctatgccaacccgttccacatataatttaacctcttccatttagtccctttatttcgcggccggatacagcggcacatatcccacatcctgcaccaactgttgtccctgcgggcttagaaaccagtccaccagcttttgtgtttccgctgtggggtgttcacgggtgaccatataaacatcaaccgtgtacgggtaactgccgttacgaatattttcaaccgtcggcgcaacatcgtttatcgccagtaatttaatctctttattgctgtgcatctgcgtagcgtaataacgaaaggtatagccaatggcgttgtgcgtattgcgatactcagccacgatatccaccatatcccccatcgcggttgccactgatgttgtttgcgctggcatcagcttcgtttctttcattaccttcgccagcatcgccgtttggctgccagagttttccggtcgctgccagggcttaatgtcgattgcctctccgcccacctcattccagtgggtgattcttccgctaaaaatgccgcgaatttgtacatcactcaacgatgacacgggattgttttggttgacgataaacacaaacgcttcacgtgcaaagggggtgtaaaccagttttacgccactggcctcggccaattgcttttgagcagtggaaggctgggcgacaaaaataagatcggcattaccgttaaggatattttgataggcttcaatggttccctggttttcaaggtagtcttcagggcagatatcatccggaaagcgcgtaagcgcataaaaagccgaggcgtataacggcaagccagccgttgcgccatcgagccgcggccaattttgagtgagcaaaagtgtcggttcatcgcgcagcccggttagcttgttgccccatgtgtgcgcctgataatcgcggaaataaagatattcactgctctcgggagcgggatacttcacggcataaagatgtgactggtatacggcacagctcccgaaaaacagcaggcaaatcaccagcaggttacgacaagtgtagcccgcaccgccgcgtagcactccccaacgcgcaccgccataccctaatgcaaaacagagctgcgagccaaccgggatgagcaacactgcccatacccagccgttgaaaaaggatattacgcggggtactaaccaaagcgtttgcaccacctgggcgatgggcttacaccctatcgcgcgaatattaagatcggtgagaaacatcaggatgacccaccccatcagcaccaccagagcgggcataagcaggcagcaatcacgccattctggatttacctctgatgcatttccctttccccatatccggccacaaagaaaaattaaccctgcgcccagaagcgctaccgggataatggtcgcctcctcaatagatcgcgcgacggggatactattttcaagaacgctaatgtacgcccacattccccccacgataatcgtaataatgttcaccagcagcggcacgccgataaacgccattatgattgacaaaaaaagccaattagcatttttcatttttctatccgctaatccctgcgataacggaagtataaacccggtagtcctgagcccacccatgcatttttctgaaatcgcgacgttaaaacattcacgatagcggcagacagaagttgaaagttccggctgccgttttttatttacaggctcacattaacctgcaagatcgatctttttccgcgcctgcccaacagcatcggcggcccgcaatgccgcctgcacagcctccggcgtaatggtaaacggctcgttgtgtatcgtttccccagtttgacaagacgccctggcaacggccagcagttcatcatcgctaacgccagccagaccaatatccgccagcgtggtgggcaagcctatatcttcacaaaattgataaacctcctcgataagctcaggcgctctatcggtgagcataagcattgccagcgtgccaaacgcaaccttttccccatgccagtatttgtgcgtggcgggcagtactgtcagaccgttatgaatggcgtgcgccgccgccagcccaccgctttcaaaaccaagcccggataatagcgtattcgcttcgataacatgttcgagcgccggagtaacctgatgttgttcacaggcaagtttcgccaggcgtccatagcgcattaaggtggtgtagcaaaagcgcgccagctcaaatgcggtcatcggtcctggcctggtggtcatattgccggcccctttgatgcggcaatcttccgcttcaaaccaggttgccagcgcatcgcctatcccggaaaccaaaaagcgtaccggcgcggcagcaataatactgctgtccaccagcacaagcgtcgggttacgtggaatcatcaggtagcgtttgaatttcccttctggcgtatagataacaaccagtgaactgcacggcgcatccgttgaggccagagtaggaaccacggcaataggcagccgcaggctggcgccggttgcttttgccgtatccagggttttcccgccccccataccaacaatcacatcggcgccaatttcctgcgcgcgtgcggagatgcgagcaatttcctcatcacagcactcgctactgaacacttcgatatcaaattcaatcaccccgtgcagtgctgttgcaactgtatcccggtaggtgttgtgaacaacaggatcctgcaaaatcagcgccttatgaccgagtgcggccaattcctgcgggagatgcgttgtcaacgctcctttaccctgaacatatcgtgacggaaagatcgcggtagtaaccattgtttctccttaaaaagcattaaagttcaatatacagaacacaaattccacataaagaatttaatgctgtttactctgaacgcacaatgaccaggtgagagcataatcttatcctgtgaggcagcgcacaattttggcgatgtattagaccgatgagcagtttccattgggttatccgctctttctcaccttatctccgttcatttttgaagcaaatcacaaaatataaccttccttagagtatggaattgacgctgtatgaatacgtcggcatagtgtcaatatacagaacagcagttccatatacagaacacatttttgatactaaagggatgcaatgatgagcattgaaatagagaaaccgaccacacgagggcgctggctgcatattattccagccacgatcctcgtttatatcgtggcctatatggacaggaccaatatcgccattgggatcgcaggcggcatggatgaagatttaggcatgacggcttcttttgccggtctggtagccgggatcttctttattggttatatcttcctgcaaattcccggcggtcagatagccgagcggctaagcgccaaaaagttaattgcctggacaatcgtcgcctggggtggctttgccctgctgaccggttttgttcagacaccgacgcagttgttgattattcgctttgtgctcggcgtggcggaaggtgctgtgtatcccgccattctggcgctgattggccactggttcccaaatgaggagcgcgccagggctatcgcctatttccagatgaacctggccgtcgcttctattattaccgggccgctttccggctggcttattgaaacctacggctggcgggagatgtttatcatcgaaggcttgctctctctgggactgctctttgtctggctacctttggtttccgatcacccgcatcaggcaaagtggctggatccgaaagagcgcgcctggatcgaacaaaaattgctggccgatcgcgcgttgagtattggcggagaacaaagcagcattcgcggcgtattaaaaagcatcaacctgtggaagcttgtcggtatctatttcttcgtacaggtcggcttctatggcttcgcgctatggatgccaaatctgattaaacacctgaccggcagcggcatgaccatcgttggggtactcactgcggcgccttacgttctgtgcatcatcggtcagtattacatcgccaaatggtgtgataaaacgatgaatcgccgcctttacacggctattcctctgctgggtttcgcggtctgcctcgccctctccttattactgaaagataacgtctggctcgcctacggcatgatggttatttgcgggttcttcctgcaagcctatgccggtccattctggacgctgccgccattactcttcgcccccaacgttctgggcggcgtgcgcggcacgatcaacgccctgggcaacatcggcggctttatcggtccgtacctcgtcgggctgttaacggtgacgttctcgcaaacagcaggaatgaccgtactggttgccgccctgcttatcgccgttggactgcttttcagcttaccttctgttaccgctcgtcctgcaggtagcagcaacacccctaacacctcgacgccgggtgcgtcacttaaacaggaaggaatcgccaaatgagccaaaaatgtcaacatgctcgcgacctgtggtcgcagctcgacgccctgcgtcttggaatgaattacagcaaagaagatgtcaataaactgcaggtcctggtggatgattgctatggtgaaagtcatccgggcagtttccatcttaaccaactgggcgatgaagccgtgctgggtgttcatgaaagcggcggtcgcgcggtccgtcaccatgtgacggatatctgcgacggctggggtcagggccacgatgggatgaactacatcctggcatctcgcgaagccattgccaacatggtcgaaattcatgcctcagtggtgccttatgatgccggtattctgatctcaagctgcgataaatctatcccggcgcatctgattgccgccgcacgcctgaacctgccgctactgcatattcccggcggttctatgcgtccggcaccgaatatgagtacttctgacctcggtgggatcactgctaagttgaagaaaggcgaaatcggcattcagcaagtggaagccatgcagcaatgcggttgccccaccgccggagcctgccagtttatgggaacggccagtaccatgcagtgcatgtcggaggccttggggctggccctgccaggcagcgctttgctgccatcgaccctggcggaaattcgccgcgttgccagaactgcaggccaccaggcgctgtatctggcggagaaaaatatcaccacccataagatcctgactcctgcggcgtttgaaaatgctatcaaagtccatgctgctattggtggcagcaccaatgcgatgatccaccttccggccatcgctcatgaacttggatgggagctgaagcccgaactgtttgatcggatcaataacgaaatcccttatctgaccaatattcagcccagcggtgaatacgttaccgaaatgatgtggttcgctggcggcgtgccaatggtgcaatggtatctgcgcgattatctggatcttgatgtgcttaccgtgactggccgtacgctcggcgacaacctggaaatgctccatcaatccggcttctttacccgcaaccacggttacctcaacaattacaaagtcagtccggaggaggtgatccgtaaaccagaaaatgccaccaaaaaagggtcgattgcggtactgaaaggcaacatcgcgcctgaaggagcggtcattaaatacgcggcctgtgcgccggatatgcaccaccataccggtcctgctcgggtctttaactccgaagaagacgctcagcaggccatcatccataaccatatcgaacccggcgacgtcattttcattcgctacgaaggcgcaaaaggctctggcgcaccggaaatgctgatgactaccgatgccatagtgtatgacaaacgcctcgacggaaaagtcgcattgattaccgacggtcgtttctctggagcgaccagcgggccatgtgtcggacacgtctcgccagaagccgctgatggggggccgattgccctggtggaagatggtgatttaatcgaaatggatgtgaaaggccgcaagctcaatattgtagggatcgacgggatgcctaaaacagaagaggaaatacgccgctgtcttgaagagcgtcgagcaagctggaagaaacctgattattcaaaccgtcgcggcgtctttaaacagttcaccgctaatgcaacatcattaatggccggagcctggcttaaataatatccctggcgggctacggctcgcctgttttaaggatcaatacatgactcagattacgaaatttcacggcgtatttccgccagttccgaccattgttaatgcgcagggagagttagataaagtcggcatggcaaccttgctggatcatcttattgcaagcaaggtcaatggcgtattactgctgggcagtggaggggaattttgccatatgaccaatgcgctgcgtctggaaaccgcagagttttgcgtccgtcatattaaccgccgtattccagtactattaggtattagcagcaccagcacgcaggaagtgattgagtatggtcagcatgccgaccgactcgaagtcgatgccgtgctggtactcaatccctactatgccagattgaccgatgagtatatttatcatcatttcaaaaccgtggctaataacataaaaagcccggtgattctctacaactttccagcattgacgggacaggaccttagcgttgatttaattacccggctggcgcaagatcaccccaatattatcggcattaaggataccgttgataatatcagccatattcgtgaaatcatcaataatgtcaggccagtgcgtccggacttcgttattttctccggctatgatgaatatatgatggatacgcttatcttaggcggcaacggcgggatcccagcgacagcgaactttgcgccacagctaacctgcgggatctaccgcgcgtggtgtgaaaaagagtatgagaccatgttcggattacagcgcaggctgtccgcgctttccactatttacagcctggattcacctttcttcgggataatcaaaaaggcaattcagcttagcggagtcgatatttcaactcatgtaatgccccccgttttgccggcaaatgaagaacatatttcgaatttgaagcagatcttacagcgtgcgggactttaagcgatgacgaaagcgggcttcttgcccgctatgtctttttatttcagcacatcagacgcgtcaggctacggctggcatccatcatcagcgtagcaagcgactcgcgtttatcatcggggatctggaacgtaacgccggatacgctcagggcggcgatcactttcccctgcgtattgaataccggcaccgcaatgcagcgcacgccaagggagtcttcttcgttatcataaccccagccgcgacggcgaattcctgctaactcctgcttaaggatattcacatccgtgatcgtcgtatccgtaaaacgcgttaatatctgatctggaggcagcaactcctccagctcttccccgctaagccatgcaatcagcacctttcccagccctgagctatgtaatgagaggcgcttgccctcccagcttcgaatcacaatagcctgtgggctttcgactttcagaaggtaaataggggcatcgccctccagaacgccaagatggcaggtcaggccggtgttatcgcgaatctcttcaagaatcggtaacgcgatttttttaatatcgtactgttccgccgctttattacctaattcatacaggcgtagccccagataatacttgtctttttcctggcgtaataacccatgctccaccatgccgttgagcaaagatgaggtactgcttttcgcaatccctgaattttgatggatctgggtaaacgttgcgccatcgcactccagaaggtaagcaaatacgcgcataattttatcgagagccggaatagatgtcgtaatctttttcatattattatcaattaattatggatttttctgctaatactatacaccagtactcgaccctttttccatgacagagaccaagtgccgctaacagattcagcagacgaatatcggcataccccccgaatataccacgataaaaaacggggccgtttggccccgttctcaagcgttaaaccgctacaaccgcaccggatcaatatgccagatattttcggcatactctttgatggttctgtccgatgagaagtagcccatattggcaatgttgagcatcgctttcgtcgtccattcttccgggcgacgatacaactcatccaccttatcctggcagtccacgtagctgcggtagtccgccagcacctgatagtgatcgccaaagttaatcagcgaatctaccagatcgcggtaacggcctggctcttccggattaaagacgccgctaccaatctgcgtcagtacctgatgtagctcttcatctttttcataatagtcgcgaggcttataaccctgcctgcgcaacgcttccacctcttcggcagtattaccgaagataaagatattctcctcgccgatatgctcctgcatctctacgttcgcgccatccagcgtaccaatggtgagcgcgccgttcagggcaaatttcatattactggtgccggaagcttctgtccctgccagcgaaatctgctcagacaggtcggcagcgggaatgatcacctgcgccaggctgacgctgtagttcgggataaacactactttcagcttgtcgccaatctgcggatcgttgttaatcactttcgccacgtcgttgatcagatgaataatgtgttttgccatgtaataggcggaagccgccttaccggcaaaaatattcacccgcggcacccagtcggcctccggattttctttaatgcggttatagcgggtaatgacatgcagtacattcatcaactgccgcttgtattcgtgaatacgcttaatctgcacgtcgaataacgctttagggttcaccaccacattcagttgttgcgctatcactaccgccagccgttttttattttccagcttcgcctgacgcaccgcatgattgaccagcggataatcacaatgctgcttcagctcgctgagctggctaagatcggtacgccaggtacgaccaatattctcatccagcacgtcagaaagcggcgggtttgccagcgccagccagcggcgcggcgtaacgccgttagtgacgttacaaaaacgggtcgggaaaatcttcgcaaaatccgcgaacagcgactgcaccatcaggttggaatggagttcagaaacgccgttgactttatggctgaccaccaccgccagccaggccatccgtacccggcgaccgttcgactcatcaataatcgacgcgcgtccaagcaggctggtatcgttgggatattgctcctgcaccgttttcaggaaatagtcgttaatctcgaagataatctgcaggtgacggggcagaattttccccagcatatcgacaggccaggtctccagcgcctcgctcatcaacgtatggttggtataagagaagacctgacagcacacctcaaacgcgtcgtcccagctaaatttatgttcatcaatcagcaggcgcatcagctcaggaattgacagcaccggatgcgtatcattgaggtgaatggcgattttatccgccagattctcataggttttatgcagttgataatgacggtgcaggatatcctgtaccgtcgccgagaccagaaaatactcctggcgcaggcgtagctctcgtccggaataggtggaatcgtccggatagagcacccgtgaaacgttctcagagtggtttttatcttccaccgccgcaaagtagtcgccctggttgaatttaccgaggttgatttcactactggcctgcgcattccacagccgcagtgtgttagtggcgtcggtgtcgtaaccggggatgatctgatcatacgcgacggccagaatctcttccgtctcaatccagcgcgcttttttaccttcctgctgaatgcgcccgccaaaaagcaccttatagcgcgtattgtggcgcttgaactcccacgggttgccatattccagccagtaatccggagactctttttgccgcccgtcgacaatattctgcttaaacatgccgtaatcgtagcgaatgccgtacccgcggcccggtaatcctagcgtcgccagcgagtccaggaagcaagccgccagccgtcctaagccgccgttgccaagccctgggtcattctcttcatcgatcagctcttcgagatctaagcccatggcctccagcgcgcctttaacgtcgtcataaatgcccaacgagagcagcgcgttagagagagtacgaccaatcaaaaactccatcgacaggtaataaacctgccgggtttcctgcgataattgggctcgattagaacgcagccagcgctccaccagacgatcgcgcaccgcgaacaacgtggcgttcagccattcgtgtttattggcaatgaccgggtctttaccaatcgtaaacatcagcttataggcaatagaatgcttaagcgcctcaacgctgagagtgggcgatgcataagtaaacggagcattcatataaatgattcctggatgactatttcaagcgatagtacagctcgcggtatgatttcgcggcaacttgccagctaaaatccatcgccatcgcctgccgttgtacaaaccgccaaagcgaaggccgtgaccacaacacaaaagcacgccgaatcgcgcgtagcaacgaccaggcattactgtcttcaaagacaaaaccgctggcgataccgtccgccagattttccagcgaactgtcggagaccgtatcggccaaccccccggtacgccgcaccagaggcagcgtgccatactttaagccatataactgcgttaagccgcacggttcgaaacgactgggcaccagaataacgtccgcgccgcccataatgcgatgcgagaaagcttcgtgatagccgatctgtacgccaacctgccctgggtgttccgccgccgccgcgaggaacccttcctgaagcaccggatcgcccgcgccgagtagcgccaactgcccgccctgctccagcagccccggtaacgcctccagcaccagatccagacctttctggttggtcagacggcttaccacggcgaacagcggcactttgtcgttaaccttcaaccccatcgcaatttgtagctgacgtttgttttccgccttctcttccagggtatcgcgcgtgtagcgcgacgccagcagcagatcggattccgggttccagatcttctcatccacgccgttcagtatgccggacaagcgcccttccagatgacgctgacgcagcaggccttccataccataagcaaactgcggttcagtaatttcacgcgcataggtcgggctcaccgccgttatatggtcggcatagtacaaaccggccttcaaaaaggagagttgtccgttgaactccagcccatgcatattaaagaatgaccacggcagttcgatgtcatccatatgctttgcataaaacatgccttgataggccaggttgtgtacggtaaagaccgatttcgccggccgcccgcgcgccgccagataggcgggcgccagcccggcgtgccagtcatgggcgtgcaccacgtcggggcgccagaatggatcaagtccgcaggccatttcacagccgacccaccctaacagggcaaagcgcagcacgttatcggtataggcatataaattcgtatcgtgatagggactgcctggacgctcgtacagatgcggcgcgtcgatcagataaatgcccacgccgttataatgcccgaacagcagcgatatcttacctgcgaaagtatcgcggcggctcaccacatgcgcgtcgggtatcccccgacggatatcgggaaaccctggaagcagaacgcgaacatcaacaccatccgcaatttgtgccgcaggcaacgcgcctatcacatccgccagccccccagtcttcagcagggggaacatctctgaacatacatgtaaaacctgcattatcgctcctgtttgacctgcagtttgcgcagcatttcacgcgtgaccagtacaataccttcttctgaacggtagaaacgacgagcgtcctcttccgcattttcaccaatcaccatgccttccgggataatacaggcacggtcaataacacagcgacgtaaacggcaggagcgccctacccaaacctcaggtaacaacactgccgaatcaatattacaaaaagaatttattctcacccgtgggaagagcacagattgcaccaccaccgaaccggagataatgcagccgccggagaccagcgagttcagcgtcataccgtggctaccggagcggtcctgcacgaatttcgcaggcggtagcgattccatatgcgtacggataggccagttctggtcatacatatccagctccggcgtcaccgaggctaaatccaggttcgccttccagtaagcttccagcgtacctacatcgcgccagtacggttcggcttgtggatcggactgcacgcaggagagcgggaaaggatgcgcgtaagccataccttcgcgggtgattttggggataatgtctttaccgaaatcgtggctggaagcgtcatctttatcgtctgccgccagcaattcatacaggtaatcggcgtcaaaaacgtaaatgcccatactggccagcgatttgctggcgtcaccaggcattgcggggggattcgccggtttttcgacaaaatcaataatcttgtcgctttcatcgaccgccatcacgccgaacgccgtcgcttctttgatcggcaccggcatacaggccaccgtgcaacgcgcgcccttttcaacgtgatcgatcaacatacgcgagtagtcctgcttgtagatatgatcgcctgccaggatgacgacatattccgctttatagcgacgaataatatccaggttctgggtcaccgcgtctgccgtgccgcgataccagttttcgcccttcatacgctgttgggctggcagcagatcgacaaattcgttcatctcttcgctaaacagtgaccagccgcgctgaatatgctgcaccagcgtatgggactgatactgagtgatcacgccgatacggcgaatcccggagttcagacaattagataaggcgaaatcgatgatgcggaacttcccaccaaagtggacggctggtttggcgcgtttgttcgttaaatcttttagacgcgtgccgcggccgccggccaggattagggcaacagatttcaatggcagctggcgcgccaacattacacgatcgttcttctctaaactcaccatgattaactccttttttatcctctctggaacacacacagtccatgcgcaggtccctgccagaccgccgttatcaccggattatcctctccagcgaatgggggaacggcgcgccattccccttcgggtaaaactatatctgtcacctcaagcgtggcatttatcgcaatcagaaaacggtccgacaacagaatttgcatcagcttaggcccgttttgccactcatccgcactcaagggttgcgcgtttttattcagccaacgcacgttgccatcgccttcttcccaccagctattgccggttaaagccggtatctgctgacgcaaacgaatcagcgcggcggtaaacgtggttaacccacgatttgcctgctgccagtccagccaggttaaggcattatcctgacagtaggcgttattgttgccatgctggctatggccgtgttcatcgcctgccagcagcatcggcgttccctgagagagcagtagcgtcgccagcagggcatgaatgctgtcgcgccgccgctccattaaatcaagcggaccgcctaatccttctttaccatgattgtcgctgtaattgctgttggtgccgtcgcgattttcctcaccgttcgcctcattgtgtttctgattgaaacagacgcagtcccggagcgtaaaaccgtcatgcgccgtgagcagattgacagaggcgccgggcgcgcggccattgcgtttaaacacatcgctggaagcggcgaaacgacaggcaaactccccggtcgtcaggttacgcggcaaccagaatcggcgggccgcatcgcgaaaatgatcgttccactcggcaaacggtggcggaaaattcccgacctgatagccgccctcgccaatatcccacggttcagcaatcagcttgaccgttgataacacaggacacgctttaatcgcggcaaacagcggcgcatcctggcgaaacgtcggcgtgcgccccatgacggacgccaaatcaaaacgaaaaccatcgacatgacaggtttccacccaatagcgcaaacactcgcacgcgtattccaccacgccgggatggcttaaattgagcgtgttgccgcaccccgtccagttgtgataatcgccatcgtcccttatccaataatagctacggttatcaattccgcgcagggagaaggttggaccgtccagatccagctcggcgctatggtttaatacgatgtccagaatgacctcaatccccgcacgatgcagcgctttcaccgcatcgcgaaactcgtccagcgccgtctcgggcgaactggcccaggcgggatgcagcgcgaacatcgccatcgggttataaccccaataattggtcagccccatacgttgcaggcgcggctcgctggcaaactgcgccaccggcaacagttccagcgccgtaatgccaagctgtttgaagtacgccaccatgaccggatgaccgagcgctttataggtaccgcgtatctcctgggggagctccggatgcaggtaggtaagccctttgacatgcgcttcatagatgaccgtttttccccacggcgtgcgcggcgcggcgtcatcttcccagtcataatggtcgctgattaccacgcttttcggcgccaccgccgcgttatcgcggtagtccggttcatcgtgtccgccgtgcaacagcggatgatcttttagttcgccctcgacccggcgcgcataaggatcaagcagtaacttcgccggattaaaccgatgcccctgcgctggctgccacgggccatgtacgcgatagccatagcgcaaacctggcctggcgccggccagataaccatgccagacatcgccgcgacgtcctggcaggtcatagcgacgctcattccctcgggaatcaaaaacgcacagctctacgcgctccgcatgggcggaaaagagcgtgaaattcacgccatgaccgtcatacgttgcgccatgcggcgttgcttcgccgatcgcaagctgcgtcattccccctcccgcatcagccagatcgtcgccaacggcggtaacgtcaggttaagagagtgctgacggccatggctttcgatctcatcgctgtgcaccacgccgccattgccggtgttgctaccgtgataatgcatcgaatcagtattgagaatttcacgccagcgtcccggctggttgatgccaaagcggtagtcgtggcgaggaacgggcgtaaagttgctggcgacgatgatctcgttaccggctttatcacggcgtacaaaaatcagtaccgagcgttcattgtcatcgaccaccagccactcaaagccgtaagcatcaaaatccagctcatgcaacgctttatggtggcgataggtgtggttgagatcgcgcaccagacgctgaaccccgtggtgccagttatcgcccccctccagcaggtgccagtcgaggctggcgtcatggttccactcgcgtccctgggcaaactcattccccataaacagcagtttcttgccggggaaggcccacatccaaccataataggcgcgcaggttggcgaatttttgccacgcatcgcccggcatacgatcgagaatggatttcttgccgtgaaccacctcatcgtgcgacagcggcagaacaaagttttcggtatggttgtacaacataccaaaggtcagcttgtcgtgatgatactggcggtacaccgggtccagcttcatgtagtccagcgtgtcgtgcatccagcccagattccacttgtaccagaaccccagcccacccgtttccggtggacgcgtcacgccagagaagtctgtcgactcttccgccatgctgaccgcgccgggcacctgctcgccaataatgcggttggtattacgcagaaactcaatggcttccaggttttcacgaccgccgaactcgttcggtatccactcgccctctttgcggctgtagtcgcggtagatcatagaggccaccgcatcgacacgcagcgcatcaatcccaaaacgctccatccagtacagggcgttacccaccagataattactgacttcacgacgaccatagttgtagatcagcgtattccagtcctggtgatagccctcgcgcgggtcgctgtgctcatagaggtgggtgccgtcaaactccgcgaggctaaattcatcggacgggaaatggcccggcacccagtcgagaatgacgttaaggcccgccgcatgggccgcattgatgaaataacggaagtcgtctcgcgtaccaaagcggcgggtcggcgcgtagaggccggtcggctggtagccccaactgccgtcaaacggatgttcgttgaccggcaagagttcaaggtgagtaaagcccatccatttggcgtaaggcacaagctgatccgccagctcacgatagctcagccagaaattgttatccgtatggcggcgccatgaacctaaatgcacctcataaatcgagatcggcgcatcaaactgattggctttttgtcgttcttcgcctggcgtcactttctccggcagtccgcaaatcatcgacgccgtttccggacgcatctgcgcctcaaaagcatagggatcggctttaatgcgcagattaccgttcgcatcaagcagctcgaatttatacagttgtccattatgcgcgccggggataaacagctcccaaataccgctctctttgcgcagacgcatcgggtggcgacgcccatcccaatagttgaattgcccgacaaccgaaacgcgacgagcattaggcgcccagacggagaaacgggtgccggtgacgccatccatcgtatcggcgtgcgcgcccagcgtttcataaggacgcaggtgggtgccttccgacaatagccaggcatccatttcctgtattaatggaccaaaacggtaaggatcgtcgatgaggttctgctgtccgtgccaggtcacggcgagctgatagcgaaagaaatttttacgtcggggtaaaacgccgcagaaaaaaccgcgagcgtcgagacattccagtttgccgactttacgtccggttttgggctcaatcacccatacgtcggtggcgtcaggtaagagggcgcggacttctagtccggcttgggtctggtgcattccgagtacggaaaaagggtccgcaaaatgtcctgcaattagcgcattaatcacgtctctatcgatacgactggacatggtttgtcatcctgttttgtggcgtcactccatctcactgaattcaacatcaggtagtgacacttctttgacctgaacggcgcagcacactgtgcatcctatctgcgtcgtcctaccttcaggttaggcttaatacccgtgggattaagctacccttaaagaatagccaatgctctgcttaactcctgataaaaatgaaacatctgcgtttactcctgtattacgcaaaaaaagggtgacgatgcacccctggtttaacacaaatttccccgccggatggcggcgctgacgcgccttatccggcctacagaaccacacgcaggcccgataagcgctgcaatagccactacgccaactggcgcagcattcgacgcagcggctcggcggcgccccataacaactggtcgcctacggtaaacgccgacaagaactctggccccatgttcagcttacgcagacgaccaaccggcgtagtcaacgtgccggtcaccgccgccggggttaattcgcgcatagtgatatcacgatcgttcggcaccactttcgcccacggattatgtgccgccagcagttcttccaccgtcggaatggatacctcttttttcagcttgatggtgaacgcctggctgtgacagcgcagcgcgccgacgcgcacacacaaaccatcaaccggaatcacagaggcagtattgagaatcttgttggtttccgcctggcctttccactcttcgcggctctggccgttatcgagctgtttgtcgatccaggggatcaggcttcccgccagcggtacgccaaagttatcaaccggcagctcgccgctgcgggtcaatgccgtaactttgcgttcaatatcaagaattgcggaagacggcgtcgccagttcatcggcgacatggccatacaactgacccatctgggttaacagctcgcgcatatggcgcgcgccgccgccggaggcggcctgataggtcgcgacggatacccagtcaacgagattatgggcaaagagaccgcccagcgacatcaacatcaggctaacggtacagttaccgcccacaaaggtcttcacgccattgttcaggccgtcggtaatcacgtcctggttgaccgggtcgagaataataatggcatcatctttcatgcgcagcgtagaagccgcatcaatccagtaaccctgccatccgctttcgcgcagctttggataaatttcgttggtataatcgccgccctggcaggtcacgatgatatcgagcgcttttagcgcatccagatcaaaagcgtcctgtagcgtgccggtggaggtgtcgccgaaggtgggcgccgcctgtccaaactgggaggtagaaaagaaaacagggcgaatagcgtcgaaatcgcgctcctctaccatgcgttgcatgagaacagagccgaccattccgcgccagccgataaaaccaacatttttcatagcgtttttttcctgcaaagagatgtgctgtgtatgcgcgccagtatcctgtggcgcatccttcaccatacaaaaagcagccaaagtcgcaagtgaaattaatcaatgatagcgaagccatcagtaatgcgacttatcctgccttaccgcgcaagcagaaagtccagtggcgattatcagggaatttgcgttaggaagggaatcatttccgtcgctgttttattgatcctaattatggatcagcgtagaaatttgcctgcttttatgcgcgtactgaaacatggcgaggcaaaatgtcgttgggcgattgccatgcacacctcaataaaaaaaccgggtagcgattacgccttacccggcttacggtgtcgatatgtgcccgtttccaggcccggtaagcaccgcgccaccgggcaacaagactcagctcagcagttggaaagcaatcatcccgacaatcgcgccgaccgtaccgaggatagtttccatcatcgtccaggtttttaacgtctgcgcttcggtcgcgccggtaaatttaccgaacagccagaagccagcgtcgttaacatgagaaaccacaattgaaccgccggcgatacagatagagagcgcagccatctgcgcgccggagaaattcagttgctctatgaccggcatcaccagaccgaccgcggttaaacacgccacggtcgcggaaccctgaatgatgcgcactgccgccgccagcacaaagcaggtaatggcaatcggcagtcccataccggttaacgcttcgcccagcgccgggccgacgccggagtcaaccagtacctgtttgaacaccccgcctgcgccaatcaccagcaggataatgcccgccggttgcagcgcgtggccacagatttccatcactttgtctttcggcatcccctgacgcatcgccaggccataaatcgctaccagacaagcgaccagaatcgcagtgaaggggtgaccgataaactcaaaccattcgtaagcggtggaaccttccggcacaaaacgcgcggcgatcgttttcagccctaccagcaccaacggcagcaggatcagcgacaggctgaagccgaaagaaggcattttgccttcgcccagatgcggctcggtaatgtcttccggtacatgcagttcaacgtaacggctgatgaaattgccccacagcggcccggcgataatcatgcccggaatggctgcgcacaggccaatcaggatcatccagccaaagtcagcgtgcatttgggatgccagcagcatcggcgcaggtcccggcagcaggaacgctgcggcagccgccacgcccgcaaacagcggaatgaccagcttcaccaggttcgttccggtgtggcgcgccattgagaacgccacgcttatcagcagcacaatcgccacttcaaagaacagcggtagcgcgcaaatcagaccggccaggccaatggcataatgcgcgcggctatgaccgaaagatttcagcatcttgacggcaatctgatcgaccgcgccggtctcgtgcagaatcttgccgaacatcgcccccagcgcgaccacaatcgccaggaatcccagcgtgccgcccatccctttttccatggtcgcggcgattttatcaagcggcatccctgaaaaaagccccgcgcccatcgagacgaccattaacgcgacgaaggcgtgcatacgcgccttcatcaccaaaaacagcagcagtaagacggaaccgacggcggttaaaaccagtgttaatgtactcacagcgtactgcctttattgatgacctcaatggtgctcgccacgacgccttccagcggctggtcgatatccaccaccagaacatcgcgttcgtcggcacccggctcttgcagcgtttcaaactgcgtcaccagcatttgggttttgaagaaatgacctttgcgcgctttcagacggctttcaatgacgtcgaaatcacctttcaggtagataaaggagaggttcgggtttccctcgcgcagcaggtcgcgatagtgttttttcagtgcggagcagacgatcagcgagattttattggtacgctgcatcgcgaaagcggcgtcgttcagcgcctgtaaccacggtttgcggtcatcatcattcaacggctcgccggaagccattttttcaatattgcagcgcggatgcagaaaatcgccgtccagaaacgcggcatgaagctgatgcgccacggcgcttgcgacagcggatttaccgctgcctgatacgcccatcagaacgtaaacgtggtgatcatgattagtcgtgctcaaagcgggcccccactctacaagttgcaaaatttgttacgggtaactgttatcggtaacattgtccaaccgcaccattcacgacgcaatgaccattcgtgccaaaagtgaataagtgtgagctacttcaaagttgtcagactaaatagatccgcccggtgacaaggtgaaacctaaatctaacattttcggcgtgaccgtttcgccgcgaatgcgggccaacagacgttccgcgccaatgctgcccattcgctcgcgtggcgtcaggacgcttgccagacgcggttccatcacctggccgatgtcatgaccgtggaacccggcgatcgccatgtcgtccgggatttttagccccaggcgctggcattcgaaggccgcccccaccgccaggtcatcgttggtgcaaaaaataccgtcaagctgtgggtattcgcgtcgcgcctggcgcatgagttcgataccggaagagtaggatgaagattgctccatcatcacactgtaaggaaccagccctgcgtcccgcatcgcctgttcatagcccttctgcttgatgatagtacgttcgtcgaggcgcgcccccagataggcgatatgacgatgaccacgcgcgataatcgcggcggtcatctgacgggcggcctcgaagttatcaaaaccgacggcaatatcgagacacggcgactggctgtccatcagttccaccaccggaatcccggcgacttcgatcatttttaaggtgcgcggcgtatgggtacgctcagtgaggatcaggccgtcgatattccaggagagcatcgattccaggcgctcctgctccatctccggtttatagccgtagtgcgccagcatggtttgataaccatgcgcgtcggtgacagcctcaatgccgcgtaacacttccgcaaagacctggttggttaaagacggcagcagaacgccaatggcgcgactggtggcgttggaaagaatgtcaggcgcgcgattaggaatgtacccgagctcatcaagcgcagccgcaattttaccccgcagcgcgacggagacctgctccggattacgcaaaaaacggctgaccgtcattttggtcacgcccacacggtcggccacatcctgaagtacgggtcttttctttttcatcgtcctgaaaggtataaaagggatagatttgcccagtttaccacggacatgcggaattaatgacaaacgatgaaaagccggatggcaacgctttcgcgtcttatccggcctacaaaaggttacagcacgttaaactggcggcaagtcaaacagcaacacttcactgtcgctgtcggcatgaatcgagattgcctgctcatcccaaatcgccaggccgtcgctggtggtggctttggtgccgttaatggtcacgttaccttttaccacctggatccagacgcggcgctcagcggcaatctgatgcaccgactgctcatctttgagcagcgcccagcggtacagctccatatcctggtggaccttcagcgaaccatcgcgagcatctggcgaaagcaccagttgcttgccctgcgcggcgtcgaagcggcgctgttcgtagcgcggcgtgatgccggtttcttgcggaatgatccagatctggtacagccgcagacgatccgttttgctcgggttgtactcggagtggcgaacgccggtcccggcgctcataatctggaattcaccggccggaacctgttctttattgcccatactgtcctggtgttctacggcgccttccagtacataggtcaaaatttccatgtctttatgcggatgcgtgccgaaaccctggcctgcgtcgatcacatcgtcgttaatcacacgcagcgccgagaaccccataaagttcggatcgtaataatcggcaaaagaaaaggtatgccaggagtcaagccagccatgattcgcatgaccgcggtcgtttgctttgcgtaagtagatcattgtgttcacccccagatgttttcgatggaataagtgtggactcattccgtccgggatcatagagggtgaaaattgactcctctgttcaaaaaatatgaataagcgcagaggagtctgtaagggctatttagccagggttatcgtcgcaggcgttgcctgttcgaaggcacgttcgaggatttccaggttggtaagaacttcagattccttgacgtaattaggcgtaccgacggtcaacgtctggtacagcgcatcatagacgcgaccatagtcacccgtttccggtttcacctcttctttcaccgtaacgccgtcgtcattgacatactccagcacgccgacggattcgtcagcggcgaaaccgggttcaccaggcataatgttcgctttcaggctggtttcttgttgatcgataccgtatttcacaaacgaacctttggtgccgtgaacaataaacttcggatagtcgattttcaccagatggctggttttcacaatggctttcaggtcaccgtagaacaattgcgcttcaaaggtgtcatccggattcgctttattacgcaggctacgaatgtcatacgcgacatgatccgggcggccaaatagcgaaataatttgatccatagtgtggacgccaagtccgtagaaagcgccatcctgcggcaggcccggtttggtttccgccacgggtcggtagtagtcaaaatggctttcaacttcgacaatcttgcccagtttcccgctctcaatcgcttttttagcagtgagaaaacaggaatcaaaacgccgattctgatacggcgtgacggtcagtcctttgcttcgcgccaggtcgaacaacacttttgcctccgccagcgtcggcgtgaaaggtttctcaaccagcacatttttacccgcttccagcgcgcgtttagcgtattcgaaatggctgtcagcatgcgtacagacgatcaccagttttacctgcggatcgcccaacacctcatccagatcgctggtgaagtgaatatgcgaatactgcggcgcctgctcttccggtttagcgtgacgacggaaaatatgcgcgacatgccaggtatctttccgattcagaacataggggagatggtaacgggtggtacttttgccgaatccaataaatgcgcagtgtaaggtcatgagacgatccttttgaagatgattgtctacaccatagcgtaaagcgtgaggagactgaatgttggattctttgccggatgcggcgttgcctttttgggcctacaaaagcagatgcctcaagatcggccgtcggcgtcgcggtcagtttgttcacggcaagcgcgcagggcccggagcgtactaaatgtacgtgaggagcacgagcacttcccggggacaaaatgacaagtaagccaggctgaaacaaaacccaaaaaaaaagccagcaaaagctggccaaaataatactggaagcaatgtgagcaatgtcgtgctttcaggttctccgtaggggttcccctgaatgcaaggcaataataatcattctcattcgcagttgtctacttctttttgcaaaaaaaatgcggttgacggaattttctttctcagcgagtgtaaatacacaattaaccctgcaggagataaggaatgagtgaaatagtgatacgccacgctgaaccgaaagattacgatgccattcgtcagatccacgcccagccggaggtgtaccacaacatgctacaggttcctcatccttccctcgaaatgtggcaggcgcggctaaccgagcaagccggggttaaacaactggttgcctgcattgacgatattgtcgttggccatctttctattcaggtcacccaacgtcctcgccgcagccacgtggccgattttggcatctgcgtggatgcccggtggcacaatcgcggcattgccagcgcgctgatccgcacgatgatcgacatgtgcgacaactggctgcgcgttgaccgtattgagttaacggtgtttgttgataacgagcccgccgtggcggtgtataagaagtacggctttgaaatcgaaggcaccggtaagaaatacggcctgcgcaacggtgagtacgttgatgcgtactttatggcgcgcgtgaaataacgcttccccgccccaccctgtggggcgaaacgtcacaaaccttcacaacattccagttattgcaacctacttcccctatatcaaaacaataaccatctgaatttcatggttattaccactttaagctttatcaccgttttttccgtaattttagcaatattaatattacatttttgttttttttggtttctgccatcactttatggtgacaatcacaacaatatactcctcccgggactaatttaaccacggtgaggtaaaaaatgaaatttgaacgccatcatagaatattgaaggaactcagtatttcgggagttgtaaaagtttcaaatctggcgaaaagtctcaaggtaacaaaggaaactattcgttcagatctcaatgaacttgccggacagggatatcttactcgctgtcatggtggtgcatttattacccttgattctcttgataacgtcgcaaaaaatgaaattgcttatgtgctggaaaaatatgaatcagcgcagaaaataaaaaaaggtctctctgccatgaaaaataatgtatgtgttattggctcgttcaatgttgatattatcagttatctaccgagattaccctcaacgggagaatcattgctggccgataaatttattttttcacccggcggtaagggatgtaatcaggcattagcagcaagctatgccgattctgatgtgcattttattactaaagtcggctcagatcattttagtgattacgccattaattttataaactcatcaaaaatccataaaagtgttatctaccagaccaaagaaacacaaacaggtacagcaaccatcatggtgaatggagataccggagataacgtcatcgctatctaccctggcgccaacatgacaatttcccctgatgaaatcaccattcagaaagaagccattgttcattcagatattgttcttgtccaactggagacgaattacgaagcgctgcagcaaacaattcgtctcgcacaaaaaaatgacataccggtcatcatcaatccagcgccgtacaatgacatggttaacaccatcattgataacattgattatattacgccaaatgaaacggaagcaggcctgctggccaatatggcggttaatgatatcgaatcagccaaatgcgcggccaaaattattcatcagaaaggcgtcaaaaataccattattacattaggtagcaaaggttcgcttgcttatgatggcacacaattcatctattccccggcatttccggcagttgtaaaaaatacggcgggagcgggtgacgctttcaatggcgccctcgcatctggtcttgcaaaaggaaagtcactggcatccgcattgtgctacgccagcgcatttgcctcacttgcggttgaaacgcctaatgcctctgatatgccggaaaacgactccgttcttcatcgtattcagggttcacattacaaacaaactatctctactcactaaatcaaggagcagactatgaacaatacgcagaaaaaactaaaggtgctctttattggagaatcctggcatattcatatgattcattcaaaaggttatgacagtttcacctccagtaaatatgaagaaggcgctacatggttactggaatgcttgaggaaaggcggcgttgatattgattacatgcctgcccacacggtacaaattgcctttccagagagtattgacgaattaaaccgttacgatgttattgttattagcgacattggtagtaataccttcctgttgcaaaacgagacattttatcagctaaaaataaaaccaaacgctctggagtccattaaagagtacgtcaaaaatggcggtggactactcatgattggtggctatctgtcgttcatgggtattgaggcaaaagccaattataagaacaccgttcttgctgaggttctgccagttattatgcttgatggcgatgaccgggtagaaaagcccgagggtatctgtgctgaggctgtctcacctgaacatcctgttgttaacgggttctcagattatccggtatttcttggatataaccaggccgtcgccagagacgatgccgatgtcgtattaacaataaataatgacccattgttagtgttcggtgaataccaacagggtaaaaccgcctgctttatgagtgactgctccccacactggggaacccagcagtttatgtcatggccgttttataccgacctgtgggtcaacacgcttcaattcatcgccagaaaataaaaaacaatggagtaacgaaagttactccttttataaaatataaggattgatgtatgaacaagaataagtactcaacccccttactgatgcttgccaccatcttagccggtatgctttccccgatgcagtctgccgttaatgggcagttaggacattggttacaagacggtaatgcttgcgcagtaatctcgtttgccagcggtctggtcgtcatgttttttattattattgcgcgcaaagaaacacgccagcaattcgcctcaatccctactctgattaaaaagagaaaaatcccgctatggaattggtttgcaggattatgcggggcgatggtcgtattttctgaaggcgcatccgccagcgcgctgggcgttgccacctttcaaacggcattaatttccgccctgctcctttccggactgctgtgcgaccgttttggcatcggtgtggaggagaagaaatattttacgccatggcgcattactggcgcattgttcgccgttatcgccaccatttttgtcgtgtcgccacagtggcactcaacctcgtttatcctgctcgctatcctcccctttttggcagggttactcgctggctggcagcctgcggggaatacgaaagtcgccgaggcaacgggctccatgctggtgtccattacatggaacttcatcgtcggcttttgtgtcctgggcgcggcgctggcgatacgtatcgcattaggccatgtcaccatccagttacccgatacatggtggatgtatctcggtggtccgctgggtctgctgtccatcgggctaatggcgattctggtgagaggcttagggctattgatgctgggcgtagcgtcaacagcaggccaactgcttggctcagtgctaattgatgaattgatcccttcattaggcaatacggtctacctggtcaccatcatcggtacgctgttcgcgttagtcggtgcgattgtgaccaccatccctgaatacagagcatccaaaatggcgcaaagaatagaggtgtcagaatgaaaggtttcctgcaaaccgtaacaggcccggtggcgcatacggatatggggctgacgctaccgcatgaacatctgtttaacgatctgtcttcggtcgtagacgagccacattatgctttttcacagcaactggtgggaaagaaagtcagtgctgacctgcagtggggactgaaacacgacccatactgctgcgccgataacatggaccgcaaagagattgatgatgttatcttcgaaatcaataactttatgtctttgggcggcaggacgattgtcgacgccaccggatcagaatccattggacgggacgcctcagcgctgcgagaagttgccttaaaaacgggtttgaatatcgttgcgtcatccggaccttatctggagaaatttgaaagtacccggatccataaacctgttgagctgttagcctcactcattgataaagaactgaatcagggtattggcgagacggatattcgcgctggcatgatcggtgaaatcggcgtatcccccgcgtttacccaagcggagcgtaacagcctgcgggcagcgtctctggcacaatgtaacaacccccacacggcaatgaatatccatatgccggggtggctgcggctgggggatgaggtgctggatatcgtgctggaagaaatgaacgtctctccggcaaaagtctcgctggcgcattcggacccttcaggaaaagatgtcgtctatcaacgtaaaatgctcgaccgtggcgtatggcttgaatttgacatgattggtctggacatcaccttcccaaaagaaggtgtcgcgccgggcgttcaggagaccgcagatgcagtagcgaatctgattgcactgggttacgccgaccaaatcgttttaagccatgatgtttttctcaaacagatgtgggcgaaaaatggcggaaatggctgggggtttgtcccgaatgtcttcctcgcctatctggctgctcgcggagtagacaacgatactctgcgcaagctttgtattgataatccagcccgattactcacggcataatctgcaaatagcccggtgtctgacaccgggcctggaattaaaaatcagtatcccgccgttaaatcatccaccgaacgcgggtcggaagcgccatacagttcaccatccggtccaaccataatactttgggtgctgcccatcgcttctttcagcgccactttctgccctttctgttccagcaactttagcgtatcggggctgaagcccttttctacccgcagttcgtccggcaaccattgatgatggaaacgcggcgcgttggtcgcttcggcgacgttcatgccaaaatcaatgctattcactaccatttgcagcacagtagtgatgattcgactcccgccagggctgccggtcaccagccaggttttgccctctttaacgacgatagtgggcgacatcgacgacagcggacgcttcttcggaccgaccgcgttagcatcgccgcccaccaggccataaacattaggtacaccgggtttagcagaaaaatcatccatttgattattcagcagaataccggtatttcccgccacaattcctgtgccgaaggtggtgttcagggtataggtcaccgccacagcattgccgtctttatccaccaccgagaagtgggtggtctggttgctttcatacggggcgagcttgcccggttttatctggctggaaggtttggccttgttgatatcaatttgatcggccagcgttttcgcataggctttgtgggtcagcgcctgccacggcactttcacaaagtccggatcgcccagatactctgagcggtcagcgtaggcgtatttttccgcttccgccatgatttgcatggcatcggcgctgccaaagccgtacttcttcatgtcgaaattttcaagaatattaaggatctgtacgatgtgaataccgcccgaggatggcggcggcatggagaagacctgatacccgcgatagtcaccgctgattggcgtacgctcaacggctttatagttggctaaatcctctttggtcatcagaccgccgttcttctgcatttctccggctatttggtcagcaatcgcccctttataaaacgcatccgggccgttttcggcaatcatttccaggcttttcgccagattcttctggaccagcttatcgccttttttcagcggctcgccgtctttccagaaaatggctttgctgttctcatggttgaggatcacttcgctgccgtaagtttttaagtcgttggccagcgcatcgttaaccacaaaaccctcttccgccagcttcatcgccggacgcaccactttattcagcggcatcgtgccgtatttctccagcgccagcgagaaccccgccacggtacccggcgtaccggatgccagatgcgacgtcagcgactttttcgcatcggcgttaccctgatcgtcgaggaacatatcacgggtcgcgccagcaggcgccatttcacgaaaatcgatcgccgtggtagcgccatctttagtgcgcagcagcataaatcccccgccgcccagatttccggcttgcggatgcgtgacagccagcgcatagcccacggcgacggcggcatccacggcattaccgccctgctttaagatatccacgccaacctgcgtcgccattgcatccaccgaggccaccatcccttgcgtcgcccgcacaggatgaaagacatcttcttcaacaccataggagactggcggcgcgacgggaggattggccaccgcgctaaacgtccccccggccagcagagcggcgatcgccacccagcgcataaacgttggtttcatcgttgtttttctccagataaatgggtgtatgtcccgtttaatcctggcccacaacgcttaaaaaatcatcatcatggcgaaatagaggtacacttaaaaagaggcctcatcgggaggagacgacaatgaaacgcttactacttattacggctttgttaccctttgctgtattggcccagccaattaacactatgaataatcctaatcagccaggttatcagatccccagccagcagcgtatgcagacgcagatgcaaacgcagcagattcagcagcagggtatgttgaaacaacagatgcaaacgcaggcgcgcagccagcagcaaaatctacagtcgcagttgaatgccaatacgcagcgggttcagcagggacagccgggcaacggtatgctcggtcagcaaacgctgcccaatacgcagggcggaatgctcagcggcagtggaaatccggaccggatgctaaaccattcccagccaatgttgcagcaggacagcgggacgccgcagcctgacatcccgctgaaaaccatcagcccttaaaactgacggcccttaaaactgaaagtgagggccgatgtcatcaatgcgatcggtgcagatacaatccacgccccagcgcagcagctctgccgcccgctggggctgattgacggtatacaccagaatccgcagacccgcggctttaatctcttgcactcgcgtctcatcgagtaatttatggttgagatggagggaaacacagcccagacgggtcgtcagttcacgccagtcttcacgccatttatccagcagtaacccgcgcggcagttcaggtgctgccgcctgcgccgcttccagcgcctctatctcaaaggaagaaagcagcggcggcgtcatcccggcccacagttcgcgggcggccaacgccacgacgcgtcctgttagccttccgctccccgttgtcggtttgatctcaatattcgccatcatgccgtgtttacggcagcgctccgccacctgcgagagcagcggcagcggctcgcctttaaattcgccgctaaaccaaccgccagcgtccacacgcaataaatcctgccagttcaactcgcccgccacgccccaaccattgctggtgcgctccaggttatcgtcatgcagcaggaaaatttcgccgtctttcgacagcttggcatcaaactcaatcatggtgtgcccgtatcgcgcgcccacgtcaatcgccgccagagtgttttccggcgccagtttaccgccgccgcgatgggcgacaatgtggggataaggccagttactcatacacgttgtcctgtttcgccatcaaaaagatgtcgctgatgttccggcagatgcagccatagcgtactgcccgccgccgggcgctgctgatgcgccaaccgcaccaccagtttctgatcgccccagcgcccatgcgccagattatccgcgcccagaatctccagcgtatctaccgttagcggcacgccgccttccgcctgcgagcttaacgcaatatgctccggtcggatacccagcgtcatgttacgtccggcatgaccccgatagtccgcacctatcggtaacgccagaccgccaggcaattcgaaacggtcgccggaagcgctgataacgccatccaacaggttcatcgccgggctgccgataaagctcgccacgaagcgactggccggtttttcatatacctctaccggcgtgccaatctgttctgcgacgcctttattcatcaccatcacccgctgggccagcgtcatcgcctctacctgatcgtgagtaacatagagcgaggtggtacgaagacgacgatgcagatgttgtaactccagacgcatctgcacgcgcagcttggcgtcgaggttagagagcggttcgtcgaataaaaagactgccggctcgcggacgatcgcgcgccccattgccacgcgctgccgttgaccgccggaaagctcgcgtggacggcgtttaagcaggccgtccagctccagaatgcgcgccgcctcccgcacacgttcttcaatatgcgctttgctcataccacgaatttttagtccccacgccatgttctcctctacgctcatatggggatagagagcatagttctgaaataccatcgcgatgccgcgatctttgggctccatctcggtgacccgtttgcgatcaatccagatatcgccgctggtcacgcgttccagaccagccaccatccgcaacaacgttgatttgccgcagccggacggcccgaccatcacgataaattcgccatccgccacgtccagcgtcagcggttgaatgacctgggttttgccgtcccagcttttggttactgcctgtagttttaaaccagccattttatttctcactatcgaccaggccacgcacaaacgcgcgctgcatggctaacacaattacgaccggagggataagggtgagcagcattgccgccatcacctggttccattgcgtggtaccttcgccggtggcgatcatccctttgatacccgctacggcagtgccaagattcacgtcggtgataatcaacagcggccacagatactggttccagccgtagataaaggtgatgacgaataacgccgccaggttggtttttgacagcggcaacacgatgtcgcggaaaaagcgcatcggcgacgcgccgtcaatacgggccgcctccaccagttcatccggaagcgtcatgaagaactgacgaaacaggaaagtggcggtagcggacgccatcagcggtagcgtcagaccagcatagctgtcgagcattttcaggttggcgatcacttctaccgtcgggaagatacgcacttcaaccggcagcatcagggtgataaaaatcatccagaagaacaggttacgcaggggaaaacgaaaccagacgatggcgaatgcggaaagcatagataccgtgattttgcctaccgtaatgctgaacgccataatgaaactgttaagcatcatcagccagaatggcgcgctattaacaccgacgccgttgacccaaatagttttgatattctccagtaactgcgtgccgggaagcagcgtcatcggcgtctcaaacaccgcacggtcgtccagcgtcgccgcgacaaacgcgacatacagcggaaacaaaatgaccgcgatccccagaatcagcatggtatggctgaatattgtcagcccgcgacgattctctatcattggtaacgcaccttactttccacatagcggaactgcaccaccgtcagaatgatgacgaggaacatcaacactaccgactgcgcggcggacgccgagagatccaggccggtaaacccttcgcgataaatcttataaatcagcgtcgtagtggcttgtaccggcccgccggcggtcgcggcgtcgatcaccgggaaggtgtcgaaaaaggcgtacaccaggttgaccaccagcaggaagaaactgaccggcgcaataagcggcaaagaaagccggaagaaacgacgaatcggcccggcgccgtcaatggccgccgcttccaccagcgagcggggaatggattgcagcgcggcaaagaagaataaaaagttgtaactaatctgcttccagactgacgcaaataccaccaggaacatcgcctgaccgctgttttgcgcgtggttccagtcatagccgaattcgccaaggaaatgggtgattaatccccgccccgggttaaacaggaaaatccacaatacggcggcgacggcgggcgcgacggcataaggcagcagcatcagcgtctgataaaaacggctgccgcgcaccacgtaatccaccagggcggcgaaaaacagcgagaccagcaggccgctaaacgtgaccagcgcgctgaatttaatcgtcgtccagaaggcgtcgagataataactgtcgtgaaaaagcgcgacgaaattctccagcccgacaaattggctggaaaaaccaaacggatcgacgctttgcagcgaataccacagcgcttcgcccgcaggccagataaagaaaataacggtgataaccaactgcggggcaaccagtaaatacggcagccagcgcgagcggaacaccggacgggatgatgacatgaaggttcttttcctggaaggtgccggatggcggtgcatgcaccttatccggcacttatacacttaagatttgctcgctttctcaaaacgacgcagcaactgattcccgcgatccactgcggtatccaacgcctgttgtggggttttcttcccggtccagacgctttccagctcttcgtccacgatggtacgaatctgcggcatattgcccagacgcaagcctttggtgaagggtaacggcggcttattcaacatctggcgagtggcgatatccgcaccggggtttttatcgtaataaccctgctcgcgggtcagctcgtaggcggcggtggtaatcggcaggtagccggttttttgatgccattcagcagcgttttccggttttgccaggaagtcgaggaatttggcgacgccggtataggtttctttatctttaccctgcatgacccataggctggctccgccgataatggcgttttgcggcgcgcccttgatatcagcgtcgtacggcatcatacccacgccatagttaaatttggcatactggcggatattggcgagcgagccggaggacgcggttgtcatcgcgcagtcaccgttataaaacttctcggtagactcgtccttacgcccaacatagctaaaatcgcctttcttattcatctcttccagcagcgcgatatgtttcacctgctctggcttattaaactccagcaccgcatctgtaccgtcaaagccattgtttttactggcgaaggggagaccgttccaggcgctgaagttttccagttggatccagccttgccagccgctggcgtaaccgcatttcatgcctgccgctctcaatttcgcggtatagtcagccagctcctgccaggttttcggcggctgctccggatctaaaccggctttcttaaaggcgtctttgttgtagtacagtaccggcgtggagctgttaaagggctgggagagcagatgcccgcttttagcatcggtgtagtagcctgcaacggtcggtacaaactgggactcgtcaaagttaataccggcgtctttaaacacttcataaaccggcttaatggctttcgaggccatcatggtcgccgtcccaacctcataaacctgcaatattgccggcgcgttgccggtacggaatgccgcgatcccggcgctcaggttctgttcatagttccccttatagaccggaacgattttgtaatccggattggcctggttgaaacgttgcgccagtgaatcaacttctttgcctaactccccttccattgaatgccagaatggaatagtggtgacggccaacgcctgacccgtaaatgccagactcagcgccagtcctaaagctgtatgtcgtaacgatatcatcggttatctctctttttgtgccgggatgcgcgatatcacgcgttttatgttcgcgggggtaacatgacatgctcgaatgacagaaaaataacttttttattacaaaaaaaagatagtaaggcgacagagagatggcaaggcagcgaaagcgccggaaaagaaaagtgggagctacggcacggataggtacgacattattctcgggggcggcgcacatgccgtaacccaaccaggcggagcgtcgccgggattaacgtctcaggcacgtaagcgaacggcaatttgctccagcgtaagccgccctgccgccgcatcgactgtcatatcgacaaaatccggattcgcagcgagtgagatcccgttacgctttaaaaacagcagcgtaataaataaggcggtacgtttgttaccatcattgaagatatgcccacgggatatagcgagcaaatgcattgccgccagcagccacacgtcggtcaccccttcatattcgatttgcttgagtacccggtacattagcgcttccgcgcggccaggatcaggcatgcctgttacaccaggcgtaacgcggagaagcctgtcgtgaaactgaattatctcttccgctgagataagttgtagggtcatttatccgccagctccctgagctcattgccatgaaccgccataatggcagcaaactcatcatccattcgcgccgtctgataacgctcaaactcctcggcgctgatgatcactgcggacttatgcccacgacgcgtgatggtaacaggcccccccgtcaccgcactttccaggacttcggccagattttgccgcgcttcgctatagttaaccgtacgcataaacatctccccagttgtacatgtttattgtacaacaaacatgtacaaaaaaagagccatcaggctcttttgaaaaattttaccgcttgccgttaccgggggcggcgcacgcgcttcccccctggcacagtctaaccgcccagataggcgctgcgcaccgcttcgttcgccagcagtgcatcaccggtatcggatagcaccacgtggccgttttccagcacataaccgcggtcggcgagcttcagcgcctggttggcgttctgctcgacaaggaagatggtcataccctgctcgcgcaactgctcaatggtgtcgaagatctgctggatgatgatcggcgccagccccagcgacggttcatccagcagcaatagcctcggctggctcatcagcgcgcggccaatcgccagcatctgctgttcgccgccggacatggtgcccgctcgctggatacggcgctcatgcaggcgcggaaacagctcgtacacccatttgatacgctcctgaaaccgatcgcgctcggcaaaaaaaccgcccatcgccaggttctcttctaccgtcatccgcgagaagacgcgccgcccttccggcactatcgccaccgcttcacgcatgattttcgccgtctgccagtcggttatgtctttaccgtcaaacaccacccgtccgctggaggcgcgcggatcgccgcacaaggtgccaagcagcgtcgttttccccgcgccgttagcgccaatcagggtaacgatttccccctggttgatgtgcagactgacgtcgtgcagcgcctgaatcttgccgtagtgggcgctgactttttcaaacgttaacatcgttttttccatcttatgcctcacccagataagcgcggatgacgtccgggttgttgcggatctcttccggcgtgccgttcgccagcggcgtgccctggttcaccacgtaaatgcgatcggaaatgcccatcaccagcttcatatcgtgttcaatcagcaagatagtggtgttgtgatggttacgtagttcggcaatcagctcatccagctctttggtctctttcgggttaaggccagccgccggttcgtcgagcatcagaatttctggctgcgtcaccatgcagcgggcaatctccagccggcgctggtcgccgtaggccagattactggcctggcggttggcatgttccagcaggccaatacgctcaagccaggtcgccgcgcggtccagcgcttcgctttgcgcgcggcggaaagcgggcgttttcaacaggccggaaaagaggcccgttttcagttgctggtgctgcgccaccagcagattttcaatcaccgtcatttcgcgaaacaggcgcacatgctggaaagtgcgtaccacgcccatgcgggcgatctgctggcccggcaatccttccagatgccgctcgcgcaacgtgatcgtaccgcctgtcggcttataaaaaccggtcaggcagttaaacaccgtcgttttacccgcgccgttagggccaatcagcgacacaatttcccgctcacgcaattccagcgatacattgttgaccgccagcaaaccgccaaagcgcatcatcaggccgttaaccgctaataatggctgactcatgcctgctctcctttcgcctgaccacttttcagcttcaactgcggacgcgtcatcggcagcaatccctgcgggcgccagatcatcatcaacaccatcaaaccgccgagcatcaacatgctgtattcgttgaagtcgcgcatcaactcgcgcgacaccaccagcagaaccgccgccaggatcaccgcaaactgcgagcccattccgcccagcaccacaatcgccagcacgaaggcggattcggcgaaagtgaaggattccgggctgacaaagccctggcgggcggcaaacaacgtcccggcgaaaccggcaaacgcggcgctgatagtaaaagcggtcagcttgatgcgcgtcgggcttaaacctaatgagcgacaggcgatctcatcttcacgcaacgcttcccacgcccggcccagcggcatacgcagcaggcggttaatgacaaacagcgacaggaccaccagcaacagggccaccagatagaggaaaatgacccggtcggatgggtcgtacttcacgccaaagaaattgctgaaggtatcccagccgccttcgcgggtgctgcggctaaactccagaccaaacagcgtcggtttcgggatctggctgatgccgttcgggccgccggtaatttcagtgttgttgagcagcaggatacggacgatttcgccgaagccgagcgtcacaatcgccagatagtcgccgcgcagacgcagtaccgggaagccgagcaggaaaccagcagcggcggagaccagtcccgccagcggcaggcaggtccagaaacccaaaccataatagtggttgagcagcgcaaaggtataagcgccgatggcgtaaaagccgccgtagcccaataccagcagaccggacagccccaccaccacgttcagccccagaccgaggatgatataaatcatggtcatggtggcgatatcgacgctaccgcgcgacaccataaacggccatgccacggcgataaccagcagcgccatcagaaacagcttttgcttaacggtagagccatcgatcgccggcagaataaacttcggtccggagacgtgcttcaccgctttctggaacatcggacgcagcaactgaaagaaaaaaaccactgccgtaccgataaagatccactgccagcggatgtcggcggcggtatccaccaccagtttggtgccgtccagctccagttgtacgcccatgaagacgccagccagaacgaagaacatcgccgcagagaacagagccatcgcaatatgcatcggtttcatactttctctacctccggacgccccaggataccggtcggcatcaccagcagtaccagaatcagcagagcgaacgatacgacatctttatattcggtacttaaatatgcagacgagagcgcttcggcgacgcccaaaatcagaccgccgatcatcgcgcccggaatgctgccaatcccgcccagcaccgccgcggtgaacgctttcatcccggccataaaaccgatgtaggggttaattacgccatagaactgaccgagcagcacgcccgccaccgccgccattgccgcgccgataacaaacgttagcgcaatgacgcggtcggtattaatgccgagcaggctggccattttcagatcctccgcgcaggcgcggcaggcgcggcccatccgggagtagcgaatgaaaatggtgagcgccagcatagccagaaaggtgactatccagataaccgcctgcatggtggtgatggacgcggaaaagttttcgctgctgcccacaatccactggccgttaaacaggctgggtaacgccacgtcgcgcgaaccttccgtcaggctgacgtagttttgcaggaagatggacatcccgatggcggaaatcagggcaatcaggcgcttggagttgcgcacgggccggtaagcgactcgctcgatactccagccgtaggcgctggcaataataatcgcaccgataaatccagcggccaccaggagccaactggtgtctattcccatcatcattagcgcggcgatgatcataaaagagacgtagctgccgatcatatacacctcgccatgagcgaagttgatcatgccgataatgccgtacaccatcgtataaccgatagcaatcagcgcgtaggtgctccccagcgtgacgccgttaaacatctgctgcaagaaatagagaaactgctcggacataaggtaacctttttaaacccgcccggcgtgcgggcggtgggataacttatcttctggcattacttcgcgacggttgacgagccgtcggcgtgccactggaagacgccaaattcaaatcccttaagatcgcctttttcatcccatttcagcggcccaataacggtatcagccccgttagctttaagatctttcaccagatccagcggagcatggctggcgctacgcgtcattgcggtcgccagtgactggacggcggcgtaggtgatccagacgtacggaccgctgggatctttcttgtcggctttcagcgcttcgacaatcgctttattcgccgggtcctggtcataacgttttggcatcgtcaccaacatgccttccgccgcaccgcccgcaatattggacagcgacgcgttacctacgccttccggccccataaattgcgttttcaggccattagcccgcgcctggcgtagcatctgccccatttccgggtagtagccgccgtaatacacaaagtcgatattctctttttgcaagcgggcaatcagggcggagaaatctttttcgccagcggtaataccatcaaaaaagacaatattggcattgccctgcttcaggccatcctgcacggagcgcgccagtccttcgccgtattgctgtttatcgtgaatgatagcgatgcgctgcggtttcaccgtttccaggatgtatttcgcggctgttggcccctgggaggagtccaggccggcggtacgcataatgtactgatagccgcgctgggtcagctccgggttagtcgcccccggggagatcatcagaataccttcatcttcatagatatcggatgctggctgagtagaagaagaacacaagtgaccaataacgtactgaataccgtcgttaacgattttgttggccaccgccaccgcctgttttggatcgcaggcatcatcgtactctacgccgaccagcttatcgcctttaatcccgcctttcgcgttgatgtctttaatggcctggcgcgcgccgttaaattccatatcgccccattgcgctaccgggccggacatcgccccgactatggcgactttaatatcatctgccattgccccctgcgagactgctaatgcaacaatccctgcgattattgttttcgctttccgtttcatgtgcctgtatccccattcgtgatgttatatgttttgttttttgctggttaaaaagcagactgtactttttataaatggtgcgctttttactgactcattaatgagttagcgcagcatttaaagcataataagattaaaatctctatttttcagtctattaagaaaagataatattctgcttttcgctatagataaacaaaaaaaagcatgcttgtcagcataaaataacggcatattaagcggaataattcactagcattcagggaattatgctgcctgttttccattctctaatgcttcaaactgtaattatcgttgttaaaaaattaataacctggtaaatgacacaaaaaagagaaagcatctggcctgcctgtttcggtacactgatcgcatcttttgaaatcgggacaagccgtcgatgaagctgaccattcttcgtttagaacactttagcgctcaggatcagatcgatctgggcaaaatctggccggaatattccgcctcctcattaagcgtagatgaaacgcaccggatttatgccgcgcggtttaatgagcgtttgttgggcgccgtaagagtgacgctgagcggaacgcagggcgcgctggattccttacgcgtgcgtgaaatcacccgtcgccgcggcgtcgggcaatacctggtagaagaagtcatccgcgataatcccaacgtctcgtcgtggtggatggcggatgtcggtgttgaagaccgcagcgtgatggccgcgtttatgcaggcgttaggttttaccgcccagcatgacggctgggagaagcgctaaaagaaagccggatggcgctgacgcttatccggcctacatgccgggagaaaagataaaaaccacctcgcaattttccaagaatttcgcgttgcaggcaggcggcaagttatgaaatccccgggagcttacataagtaagtgaccggggttgaataacgtagccaacgcacctgcagcgcgaaaggcgccagaaaatcacttagcgtctgtcgccgtaccattcgcatgccagtcaaacacgccgaactcaaatcctttcagatcgcctttctcatcccacgacagcggtcccattacggtgtcgaccgtggcgcctttcaggtatttggcgatttccgccggatcgtcggagtggttcaggcccgcctgcaacgattgcagcgcggcgtaggtggtccacacgaatgcgccgctaggatcttgtttcttggctttgatggcatccacaatcggtttgttcgccgggacctggtcgtagttcttcggtttggtgaccagtaagccttccgctgactctccggcgatgttagacagcgacacgttcgccaccccttccggccccataaactgggttttcagccctgcggcgcgggactggcgcaaaatctgccccatttccgggtgataaccgccgtagtagacaaagtcgatattctctttcttcaggcgcgcaaccagagtggagaaatctttttcgccagcggtgatgccgtcaaagaatacgacgttaacgccgcctttcttcagaccgtcctgcaccgcgcgcgccagcccttcgccgtactgctgcttatcgtggataatcgcgatgcgctgcggttttaccttctccagaatatactttgccgccgttggcccctggtcagagtccagaccggtggtgcgcaaaaccagcttatagccgcgcgcggtcagctccggcgcggtcgccgccggggttatcatcaggatgccttcgtcttcgtagatatcagacgctggctgtgtggaagaggaacataagtgaccgataacatacttgatgccgtcgttcaccactttgttagcgacagctaccgcctgtttcgggtcgcaggcgtcgtcatatttcaccgcgacgagcttatcgcctttaataccgcctttcgcattgatatcggcaattgcctgctccgcaccggtaaattcctggtcgccatactgcgccaccggaccggacatcgcgccgacaaccgcgactttaatgtcgtcggcgaatgccatatggcttaatgacagggcgatacatcctgccaataacgttttacccttcatattcatcctgataatccccattattctggttgttacgtgtgttgtggtgttattgttcagcactttatttcgattattggctagctacccgtgctttagcagcatactctgctaaaacatacccgatttttattattttggaatagctaaatttacatccagataacagatttgtgtcggtgggggagaggaagggtccgtaggcccgataagcgaagcgccatcgggcaaacgtattgccggatggcagcgtaaacgccttatccagcctacaaaaaacaaaacccccgaattcacattcgagggttcattggcaattcgcgaagattacgcttcgatcgcagcgcgaagctttttcatggcgttcttttcaagctggcgcacacgctcagcggagacgccgtaacgatcggccagctcctgcaacgtagacttattgtcttcgtccagccagcgagcgcggataatatcctggctacgctcgtcgagcccctgcatcgcgtcggtcagtcggttggcggcctgctcttcccagttatcgtcttcaatgccgtcggcaaagttagacgatttatcctgcagatacagcaccggcgccattggctggctgtcggactcatcgtccgaagacatgtcaaacgtcatgtcctgcgccgccatacgcgactccatctcacgcacgtctttactggaaacacccagttcgcgcgccaccatttcaacctcatcctgattaaaccagcccagacgctgcttggttttacgcagattaaagaacagcttacgctgcgctttcgtggttgcaactttaacgatacgccagttacgcagcacgtattcgtgaatttctgctttaatccagtgtacggcgaaagaaaccaggcgcacgcctacttccgggttaaaacgacgtacggctttcatcaggccgatgttgccttcctggatcaaatccgcctgcggcagaccatagcccgcatagttacgagcaatatgaacaacaaagcgcaggtgagacaggatcagcgttttagctgcttccagatcgccctggtaatgcagcctttcagccaatgcccgctcctcgtcagccgataacatcggccacgcgttcgccgcccggatataagattccaggttgccaacaggggctaaagctaaattttgcatttctttggtcattcaaatcctctcaatcagtattgcctggcaccgtcagcgagcaacaaccgtgccaaagccgatgagcaacgagaatatcacccactcttttatcagacagtgattttatccacaagttcaatgtaacactgtgcataatttgcacaaatcttgtgacataaagatgacgcgcggggaagagacaacagggactctttccctgcgaacggaagcccattgcagggaaagattataccacgattttatcaatcgggagtaaagtgacgtaaatgttgcaccgtggccagccaggcggcgatccagccaatcatggaacagaccagcagcagcaacaggcactcatcgaacgataagccattgagatcaaacttcgtgccgaagacctgcgccacttcagtcaccgccgatgataaacgcatcaccaaaatttcagacaatatcagtgacagaaacgcgccggaaaaaccgagcaacgcgccgccatagaggaacggacgcaggataaagccatcggtcgcgccaatcagcttttgcacgttaatggtgtcgcgacgggcaaaaatgctcaggcgcacgctgttgccgataacgaggaagaccgccgcgaccatcagcacgccgatcatcgccgatacgcggcccaccagcccggtgagcgccgccaggcgcgcaaaccagctatcatccatgcggacttcgtcaatgccgttaatctgcgagatacggtcgcgcagcgtattaagcgaggcggtactttgaaagtccagcttggggatcaccaccgccaccgccggtagcgggttctcttccagcatatccagcgcgccgccaaaacccgaccagttgcggaattctcccagcgcgtcctcacgggacaggtagttgaccttctcaacgccctgctcggcctgaagctgcccaacaacccgcgccgccgcgtcatcatccagcgttttttgcagataaacggtgatctgcggcgacggataatactgagtcgccgcctggttgacgttcttatagaccatgtaacagacgctgggcagcgtcagggagatggcgatcaccatcaccgtcagaaacgtcgccagcggtttgcttttcagatcttgcagcgcgccgtgccaggcatagcgcacctgctcattaaagacgttcgttttacgtgagttcggtttcggcgtcggcttctggcgtcctggcgcgttgcgcccgccgcctgttccgccgcgagacttacgcagtcgatccagccgtccgccgaactgcctgatttggttaatcgcgtcgcgcctattcattggccaggcctccatgcagatgtccatcgctcaggacgagctgcctataggaacgacgggagataagtccaatatcgtgcgtagccatcagtaccgtcacccctacgcggttaaactcttcaaacagacgtaaaatcccttccgacaacgcgtcgtccaagttcccggtcggttcatccgccagcaataccgctggcttattgaccaccgcgcgggcgatgcccacgcgctgctgttcgcctccggagagttgaatcgggaagtttctcgctttgtccagtagtccaaccttatccagcgccgccgacacacgacgacggatatcatcgccgctggcgccggcaatgattaacggtatcgccacattgtcatagaccgtgcgatccatcagcagatggtgatcctggaaaatcatcccaatctggcggcgcaaaaacggcacttcgcggtttttcaagcgcgtaatatcatgcccgctgaagaagattttgccggcgctgggccgctcaatcccacagattagcttcagcagggtacttttccccgcgccggagtggccggtcagaaacgccatctcgcctggccgcatatggaatgtcactccctgcagcgcttgtctcccgccgagataggccttgctgacatgttcaaagcgaatcattgttaatcctctcgggcaaaaagtgcctcaataaaatcgtccgccttaaacggacgcaaatcctcgatacgttcgcccacgccaatgtaacggataggaatgccaaactggtcagctaccgagaaaatcaccccgcctttcgccgtaccgtccagcttggtcagggtaataccggttaagcctaccgcttcatggaacagtttggcctggcttaccgcgttctgtccggtgctggcgtcaatggtcagcataacttcatgtggcgcttcttcgtccagctttttcatgacgcgaacgatttttttcagctcttccatcaggtgcgacttgttctgcagacgccctgccgtatcggcaattaacacatccacattacgcgccttcgcggcctggatagcgtcaaaaatcaccgaggcggagtccgcgccggtatgctgggcgataaccggaatattgttacgctgtccccagacctgtagctgttcgaccgccgccgcgcggaaagtatcccccgccgccagcatcactgatttaccctgctgctcaaactggcgcgccagtttaccgatagtggtggttttacccacgccgttcacgccaaccatcagaataacaaaaggcgttttaccttcaatattaagcggttcgtctaccttcgccagaatctcgcccatctcgtctttcaacagaccatacagcgcctcggcatctttaagctgtttgcggctggcgccttccgtcagattagcgataatcttacgcgtggtttccaccccgacatcagcgatgagcaactgctcttccagctcctcgaacaaatcatcgtcgattttcttgccgcggaacagactgataaatccggaaccgagattttctttggttttcagcagactgcgtttcaggcgggcaaagaaaccttctttagtcggtttttcctgttcctgaacgatcgcttccaccggcgcgtcttcttccgccggcggaacaaccatcaccgcctcttccgccgcctgagcggccagcgcctgcgcttccagctcttcgtcggtgaatttcgccgcgttttcgccctcttcttctaccgcggcaatgacctctacggtttccgcttcggcctgccactcttccggcgagatagcctcgtctttgacctcttccggcagcggcaattcctcgcgttccactgcgatctgcggcgctgccgtctcaatggccgccgcgggctccggctctaccggctgcggtttttcgctctcctgaactttctcagtaacgtccaccacctcttccgcaaaggcttctgtttctgctttgctgtgcgcgggcgtttgcgcgtctacgtctgccgccgtttcaacagggggctcaaccggtcgttgttcctcaacaatctgctgttcttcggtctgttcctgcttctgctctttatcaccgaagcccaaccaggaaaagaagccacgttttttctgttttgccatctgcgactacacccctcgcggcgctatatacatggaagctaaaaaaatgatgaaatagtctatcacttaacttaattcacatcaccgcctggaataacttgcaacaggcggttcgagcaagagaaatgaaaaaaccgactcactctggcagcggccaaatccgcattattggcgggcaatggcgtggccgtaaattaccggttccggacagcccgggtctgcgtcccaccaccgatcgcgtgcgcgaaacgttatttaactggctggctccggtaatggtagacgcccattgtctggattgctttgccggcagcggcgcgctgggtctggaagcgctatcacgttatgcggcccaggcaacgttactggaaatggatcgcgccgtatcgcagcagttgcaaaaaaatctggcgacgctgaaagccaacaatgctcgcgtcgtcaataccaatactctgaccttcctcagccagccggggacgccgcatcacgtcgtctttgtcgacccgccgtttcgtaaagggctgctggaagagacgttacaattgctggaaacccagggatggctggccgacgacgcgctaatctacgtagaaagcgaggtggaaaacggtctgccgcccgttccggcgaactgggcattgtatcgagaaaaggtggccggacaggtcgcttatcgtctgtatcagcgcgacgcgcaaggagaaaatgatgttgattaatctgggccgcttattaatgctcttcgtgtgggcatttttgattcttaatctggtgcatcccttcccgcgcccgctcaatatcttcgtcaacgtggcgttggtgttcatggcgctgatgcacggtatgcaactggcgctgctgaaatcaacgataccgaaagcgggtccgcagatgacgacgggagagaaaatccgcattttcctgttcggcgtgtttgagctgctggtctggcagaagaagtttaagaacaaaaaataacgtttgctgccggatgacggtttattcgttatccggggtacggctaacaaacccgacgaaccgcgttcccttatagctcagcgtaccttgatcgcccaccgtcaaagcgtggtactgctgcgcttgtaaacggaacgttttttccagaccgccattgagcggcttaaaactgacctcatagcgcatactggttcccgccgggatcacttcctgctggcgagagcgtcggtcattaaccggcttctcccgtttattgctgaccacgacctgcttttgctgtaacggcgccgcctcattagcggctttttcccgccgttgctgaacgaagcggaacgacgcggcaactacgattaatgcaatgattataatgaagaaaagcggtggcttactcatactgttaacctgtcagaaaatgcggaaataagcataccctgcccgttatagtgttgtcatctgaccgtcacggcctctacactgaataatagagccgcaagcataccgtttgcgaaaaaataacgaattcaaggaattaagatgctttggtcgtttatcgctgtctgcctgtccgcatggctgtatgtggacgcctcctatcgcgggccagcctggcaacgctgggtttttaagcccgtcacgttattactgttgctgttactggcctggcaagcgccgatgtttgacgccatcagttatcttgtgttggccggactgtgcgcctcgctggtcggcgatgcgttaacgctcttaccgcgtcaacgcctgctgtacgccgtcggggcatttttcttatcgcatctgctctacaccatttactttgccagccaaatgacgttgtcgttcttctggccgctgccgctggcgttactgatagtcggcgcgttgcttatcgccgttatctggacgcgactggaggagctacgctggccggtatgtacttttatcgccatgacgctggtcatggtctggctggcgggcgaactgtggttcttccgcccaacggcgccagccctttcggcctttaccggcgcgacgctgctgttcatcggcaatatcgtctggctgggtagccattaccgccgccgtttccgggcggataacgcgattgccgccgcctgctactttgcaggacacttcctgattgttcgctcgctgtacctgtaaataatagcgcttgactctggagtcgactccagagtgtatcctccggttaatgagaaaattatcatcaaccggaggacgttatgtcgacccctgataccgatggcaaaaaagtcccgccctttacctccttcagattagccccggcaatacagaaggccgatagctgctgctgcgaagaacattgcgcgtccagcgcgcctgtttctactgccatggcaggcacgcgctatacctggaaaatctccggcatggactgcgccgcctgcgcccgaaaagtggagaatgcggtacgccaaattcgcggcgtcaaccaggcgcaagtgctgttcgccaccgaaaagttagtggtcgatgccgacgccgaccttcgcgcgcaaattgaacacgccgtacagaaggcgggttataccttgcgtagtgaagattcgcgcgacgccgcacctgaatctcgtcttaaagagaacctgccgcttattacgctgatcattatgatggcgataagctgggggctggagcaatttaaccacccgttcggccaactggcctttatcgccaccaccctggtcggtctgtatcctattgcccgccaggcgctgcgactgatgaaaagcggcagttggttcgctattgaaacgctgatgagcgtcgccgccattggcgcgctgtttattggcgcgacggcggaggcggcaatggtattgctgctgttcctcatcggcgagcgcctggaaggatgggccgccagccgcgcccgtaaaggcgtcagcgcgttaatggcgcttaaaccggaaacggcgacccgtctgcgcgacggcgtacgggaagaggtcgctattaataccctgcgaccgggcgatattatcgaagtcgccgccggggggcgtttacccgccgacggtaaactggtttccggtttcgccagctttgatgaaagcgcgctcaccggcgagtctatcccggtggagcgcgcaacgggcgacaaagtcccggcaggcgcgaccagcgttgaccgtctcgtcaccctggaggtgctatctgaacctggcgccagcgcgattgaccgtatcctgacgctgattgaagaggcggaagagcgccgtgcgcccattgagcggtttattgaccgtttcagccgcatctatacgccagtcattatggtcatcgcgctgctggtgacgcttattccgccgctgatgttcgatggcggctggcaggagtggatttataaagggctgacgctgctgctcatcggttgcccgtgcgcgctggtgatctccacgcccgcggccattacctccgggctggcggcggcggcacggcgcggcgcattgattaaaggcggcgcagcgctggagcaactgggccgtatcacgcaggtcgcctttgataaaaccggtacgttgaccattggtaaaccacgggtgacggcgattcatccggcaagcggtatcagcgaagctgaactgttggcgctggcggcagccgtagaacaaggcgctacgcacccgctggcacaggctattgtccgcgaagcgcagacacgcgatctggcgatcccgacggcggaatcgcagcgaacgctggctggcaccgggattgaagcgcaggttaacggcgaacgtattctgatttgcgcggcgggaaaacagcctgcggcagcgtttgccgggcaaattagcgaactggaaaacgccgggcagacggtggttctggtgctgcgtaacgagaccgttgttggcgtcctcgccctccaggatacgttgcgtgacgatgcgcgcgacgccatccgcgatctgcatcagttaggcgttaacggcgtgattctgactggcgataacccacgggcggcggcagcgattgccggcgagctggatctggcgtttaaagccgggctactgccggaagacaaggtgcgggcagtcaccgcccttaaccaacaagcgccgctggccatggtgggcgacggcattaacgatgcgcccgcgatgaaagccgccagtatcggaattgctatgggcagcggtactgacgtcgcgctggaaacggctgacgccgcccttactcataaccgtctgcgcgggttagcgcagatgattacgctggcgcgcgctacccacgcgaatatccggcagaacatcaccattgcgctggggctgaaagctattttcctggtgacgacgctactgggttttaccgggctatggctggcaatcctggcggatacgggagccacggtattggtgaccgccaacgcgctacgtttgctgcgtaaaaactaatcttctcccgcccggcggcgtcgtgtcgccgggttatcccgcgatattcctttctttgttcatattattcacgcgaaaattatttattttctattacttatcaaaccattaatcagaaatagcgtgatttgatgtaaggttaatttttatccaaccgatattgatcataccgtctacaaaataaggaatgttaggcactatgaaaaatatcaaagtcatcaccggcgttatcgcgacgctgggcatatttagcgccttattgctggtgacaggaatactgttttattccgccgtcagcagcgatcggctgaatttccagaatgcgagcgcactgagttaccaacaacaggaactgggcggcagttttcagacattgatcgaaacccgcgtcaccattaaccgcgtggcgatacgcatgttaaaaaatcagcgcgatcccgcctcactggacgccatgaacacgctgttaaccaacgctggcgcgtcgctcaacgaagcggaaaaacatttcaacaactacgtgaactccgaagcgatcgcgggcaaagatccggcgttggatgcccaggccgaagccagctttaagcagatgtatgacgttttgcagcagtctatccactatcttaaagccgataattacgccgcctatggcaaccttgacgcgcaaaaagcgcaggatgacatggagcaggtatatgaccagtggctctctcaaaatgcgcaattaataaaattagccagcgatcagaatcagagcagctttacccagatgcaatggacgctggggataattctacttatcgtactcatcgtgctggcgtttatctggctggggctgcaacgcgttctactccgcccgctgcaacggattatggcgcacattcaaacgatcgccgacggcgatcttacccatgagatagaggctgaaggacgcagtgaaatgggccaactggccgccggtctcaaaacgatgcagcagtcgttaatccgtaccgtcagcgcggtgcgcgataacgcagactctatctatactggcgcaggcgaaatttccgccggcagcagcgacctctcttcccgtaccgaacagcaggcctcggcgctggaggagaccgccgccagcatggaacagttaaccgccacggtacggcaaaacaccgataacgcacgacaggcgacgggtctggcgaaaaccgcatcagaaaccgcgcgtaaaggaggacgcgtggtggataacgtagtgagcaccatgaacgatatcgccgaaagctcggaaaaaattgtggacatcaccagcgtgattgacggtatcgccttccagactaatatcctggcgctgaacgccgcggtagaagccgcccgcgccggcgaacaggggcgaggattcgcggtcgtggccggagaggtacgcacgttggccagccgtagcgcgcaggccgccaaagagatcaaagtactgattgaaaactccgtgtcgcgcattgataccggctctacgcaggtacgcgaagcgggagaaaccatgaaagagatcgtcaacgccgtgacccgcgtgaccgatattatgggcgaaatcgcctctgcctccgatgagcaaagcaaaggcattgagcaggtggcgcaggcggtatcggaaatggacagcgtgacgcagcaaaacgcctcgctggtagaagaatccgcagcagcggcggcggcgctggaagatcaggctaacgaacttcgtcaggcggtcgccgcgttccgcatccagaaacagcctcgtcgggaggcgtcgccaacgacgttaagcaaaggtttaacgccacagcccgccgcagaacaggcgaactgggaaagcttctaatcagaatagtatctgccgtgcagttaatgcgctttacgcaataaataacggtacggcagaccctccgtctcttgcgccagcaaatcgtgttccataaaggtacagaaccccggaatatcacgcgtcgtcgccggatcgtcggcgataatcagcaatgtttcgccagtttgcatgttgcgcaccgttttgcgcaccatcattaccggttcagggcaacgcagccccagggcgtcaagcgtatggtcaggggaggaaaacagatcgctcatcttcgtctcaatggtagaaaaacggcgatattttacgcccatcttcgtcagtaagccaggcaggttaacgattgcgtgaaaattagccattgcaatgccagcgcaaaacagtattatgcggcggttctttattgggttccctcaccccatccaacaaaaaggtcacaatatgactccgtttacacaatcacagcgcataaaagcgttgttctggctatcgctattccatttactggtgatcatttccagtaactatctggtgcagctccccatcactatttttggtttccacacgacctggggcgcgtttagttttccttttatttttctcgccaccgatcttaccgtgcgtatttttggcgcaccgctggcgcgccgcattatcttcgccgtcatgatccctgcgctgctggtgtcatatgtggtgtcatcgctgttctatatgggcgcctggcaaggtttcgccgcgctggcgaactttaatctgtttgtcgcccgtatcgccgccgccagctttatggcctacgcgctgggacagatccttgatgtccatgtgtttaaccgcctgcgccaaaatcgtcgctggtggctggcgccgaccgcttcaacgctgtttggcaatatcagcgatacccttgcctttttcttcattgcgttctggcgaagccccgatgcctttatggccgggcactggatggaaattgcgctggtggattattgctttaaggtgctcatcagcattattttcttcctgccgatgtacggcgttctactgaatatgttgctgaaaaagctggcagataaatctgaaatttccccattaccggcaagttaaaggttcgttttccgagttgtgataagatgagcgaatgagccgttatggccgtttatcgaaaggaagaagtcaatgcgcaatttggttaaatatgccggtattggcctgctggttatggggcttgcggcctgtgataacaacgatacaaaagcgtcggcagaaagcgccgccgcggaaagccaggcatccggtcagcccatcagcctgatggatggcaaactcagtttctcgctgccggcggatatgaccgatcaaagcggtaagctgggcacccaggcgaataatatgcacgtttattctgacccgacgggccagaaagcggtgattgttatcgtcggcgataataccgatgaagcgttgccggtgctggcaaaccgcctgcttgagcaacagcgtagccgcgacccgcagcttcaggtcgtcaccaataagtctattgagctcaaaggccatacgttgcaacaactggacagcattatctccgcgaagggccagacggcgtattcttccatcgtgctgggcaaagtggataaccaattgctgacgattcaggtcacgctgcctgcggacaatcagcaaaaagcgcaaaccacggctgaaaacatcatcaatacgttggttattaagtaacctttacgacgatgatgcggcctccggcagtgcagacggaggccgtttttttaagcgccaggtcagcaatagcgccatcgctaccagcccggccgccgccagataaatcaccggcacgcccgcccaggtcatcaccagccctgccagcggcccggtaacccccaaagacatatccataaagacggtataggtcgccagcgccgcaccctggttctgcggcggcacggctttgacggccaccacgcccagcgccggaaagaccagagaaaaacccatccccgtgagtaaaacgccgatttttgccatccacggcatggctgccgttcccaccagtaacagaccaataatctccacgccaaagcagatcatggcgacattcaacccgcctaaacgattgatgccgttagggaacagcaaacgcgtgccgacaaacgcgacgctaaataacgtgagcgcaaaagcggcgccatcccagcctttagcatcataaaataaggtaataaacgtcgcgatgacgccaaaccctgccgaggccagcgccaacgccataccatacagccagacacgccccagcaccgcgcgaaacggtagcggcttgcctttgttcgccttcaccgacggacgtggaagggctaacagtaccgccaacagcgccacgcccatcaccgttagcgccagtccctgtaacccgccccaggcataacacagcacgcccagcggcgcgcccatcgccattgcgccgtaggtgacgataccgttccaggagatgacccgaccaatatgcaacgacccgacgacgccgacgccccacagtgtcgaaccggtgccggcaaaactttgcccaatccctaaaatcacgcgacccagccccagtagcaacaaactgatcatcggccaggcgctggcgatatccgccagcaggtagccgagtccgcttaaaaaacagccgcataagccaaagacaacgatttttttcggccctaatacatccgcataccgcccggcatggggacggcttaacagagtggcgaagtattgcaggctgataataagccccgcccagaacgcgctgaatcccatcgcatcatgcacatagccgggcaagacggcgagcggcaggccgatggtcaggtagctggcaaagttaaacatcacaatggagacaatacgcagattgaggcgcaatccgtttagcgccggttcagcgacgggttcgggcatgagtatcaccgcatttttacaacatgttttcttttctatcatggcgcgcggtgaaaatcagtagtgagattcagattatcggtatcagggcagccgctacacttagaaaaaaacacaacaaggaaaacttcatggcaaccgctcaacccgacaaaacgggtatgcatattctgctgaaactggcctccctggttattattctcgccgggattcatgccgcggcggatattattgtacaactcttgctggcgctctttttcgccattgttcttaatccattagtgacctggtttattcgtcggggcgtgaagcgaccgctggcgattactatcgtggtggtcgtcatgctgatcgtgcttaccgcgctggtgggtgtgcttgccgcatcgcttaatgaatttatcgctatgctgcctaaatacagcaaggagctgacgcgtaaggtcttacaccttcaggagttaatgcccttcctgaatttacatatgtctccggaacgtatgctccgcgggatggattccgataaaatcatgctcttcaccacaacattaatgaccggcgtatcgggcgcgatggcaagcattgtgctgctggtgatgaccgtggtttttatgctgtttgaggtgcgtcacgtgccttataaattacgtttcgcgctaaacaatccacaaatccatattgccggcctgcaccgcgccctgaaaggcgtctcgcattatctggcgctgaaaacgctgctcagtttatggacgggcgcgattatctggctgggactggcgttaatgggtattcagtttgcgctaatgtggggcgtactggcctttttgctcaattacgttcctaatatcggctcggtgatttccgccgttccccccatgattcaggcgctgttatttaacggtttttacgagtgcgtactggtcggcgcgctctttttggtggtccatatggtgattggcaacattatggagccacgcatgatgggccatcgtctgggaatgtccacgctggtggtatttctttcgttattggtctggggatggctattaggcccggtcgggatgctcttgtccgttcctttgaccagcgtctgcaaaatctggatggaaaccactaaaggcggcagcaaactggcgatcttactggggccaggccgaccgaaaagccgtttaccgggatgaggcgacagatgctacaatctcctcttcttcataggcaacgttggtcctgatatgtaccaggtcgttctgggaaaagtgtcaacattaagcgcaggtcaattgcccgacgcgttaatcgctcaggcgccgcagggcgttcgccgggcaagctggctggccgggcgcgtgctgctttcccgtgcgctctcgccgctaccggagatggtgtatggcgaacagggtaaaccggctttttccgccggagcgccgctgtggtttaacctcagtcatagcggcgacactattgctctgttgcttagcgacgaaggtgaagtcggctgcgatattgaagtgatccgcccgcgcgataactggcgttcgctggcaaatgcggtattcagcctcggcgaacatgctgaaatggaagcggaacgtccggagcaacaactggcggcattctggcgtatctggacgcgtaaagaagccatcgtaaaacaacgcggcggcagcgcctggcaaatcgtcagcgtggacagcacgttgccctctgccttgtcggtcagccagtgtcagctcgatacgctcagtctggcagtctgtacccccacaccgtttacgctgacgccgcagacgataacgaaagcgctatgacacattaatttttccctctggcggcggacgtgtgttacaaaatgcggagcttcccatgcgccgacgcgccataccaaaaggtttaagtcagatgcaacgtgtcaccatcaccctcgatgacgatttactggaaacgctggacagcctgagccagcgacgcggctataacaatcgctccgaagcgatccgtgatattctgcgcggcgctctggcgcaggaggccactcaggaacacggcacacagggtttcgcggtactttcatatgtttatgaacatgagaaacgggatttagccagccgcatcgtctccacccagcatcatcatcatgatttatccgtcgccacgctgcacgtccatatcaaccacgatgactgtctggagatcgccgttctgaagggcgatatgggcgacgtacagcattttgccgatgatgttatcgcccagcgcggcgtgcgccacggccacttgcagtgtttgccgaaagaagactaacgccgggggcgcttcgcttgcccggcctacgttcgcacgtctgtcgtttgtaggccggatgaggcgcagccgccatccggcaataatgtttacgccattgtgccaatcgtttttctgaagcgtaacagcgctatcaggaagaacacgccgcctatcgccagcagggtcaggaactgcggccagacgatactcaaacctgcgccgcgataaagaatagcctgggcaaggctgacaaaatgcgtcgtcggcatggtcagcataatatcctgcaccgcctgcggcatactttcgcgcggcgtggaaccgccggagagcatttgtagcggcaacagcaccagaatcattaataaccccagctgcggcatcgaacgggcgatggtgcccataaaaatcccaattgaagtggtggcgaacaggctcagcgccacgcccaacataaacaatgggatcgatccttcaatcggtacgccaagtacgcctttcaccatcagcatcaaagacaaaccggaaaccaccagcacgaccagccccatcgaccacactttcgccatcatgatctcaaagggcgtgaccggcatcactaacagatgctctaccgtgccgtgttctcgctcgcggatcagcgccgacccggtcagcactatcgccagcatggtaatgttgttgataatcgccatcacgccgccaaaccacgccgggtcgagattcgggttaaagcgcatccgaatctccagcgacaccggctgaacgttatctccccgcgcgcgcgccacaaagctgttgacctcgccgctaataatattctggatataactgttgccggtaaacgcctggctcatgcgcgtcgcatcgacgttaacctgaatatcaggctgacgtccggccagcacatcacgctggaaattcggcggaatattgaccgcaaaggtatagcgtccggcatccagtccggcatccatttccgttgccgtaatcatctccggcggcagaaaccacgggcggtaaaaactattcacaatacggttcgacaactgcgactgatccatatcggcgatggcgataggggcaagatgcaacgaaccgggcaggacggtagcagaggagtaaaccgaaatcgtaaaggcgaagacgatcagcgccagcatcgctttgtcgcccagcagactgcgcagttctttgacgccgaggttataaatattacgtaatccgcgcattacccctcctgttttttcagcagcagaatgctcagacccatcaccaccgggacggcaatcagtaacggcataaataacggccagagatcggacagatccaacgctttggaaaacgtcccgcgcgcgatcgtcagaaaatgactggtcgggtagatctcgccgatccatcttcccggtccttccagcgaagccaccggatcgatcatgccggaaaattgtgttgccggaatgagggtaataatcgacgtcccaaaaatagcggcgatttggctcttcataaacgtggagatcagcagccccagaccggtggcgatgatgacataaagcagcgccgcgagggtaagcgtgagaaagctgcctttcagcggcacgccgaacacaaagaccgacagcgcgcacagtagcaagaagttcagcatacccagcgcgatatacggcagttgtttacccagcaaaaattcgctgcgcgtcgtcggcgttacgtacagattaatcatcgaccccagctctttctcccgcaccacgctcagggcgctaagcattgacgggatcatcatgagcagcagcggaatgaccgccggaacgatagcgggcagacttttcacatccgggttatagcgatagcgcgtttcaatattgagcagcccgacctgtttaaccgggttcggctgacgacttgccgcctcctgcagccagctttggtgcatcgcctgaacgtaccccttcaccgtctcggcgcggctgggcatggcgccatccacccagacgccaatctgcgctggcgtaccgcgagcaatatcgcggccaaaattaggcgggatctcaatggcaaccgccagctctcccgaacgcatccgccggtcaagctcgtcatagctggcgagcggcggctgttcgataaaatagcgggatcccgccagattgagcgaccatgcctgactactgacggtctggtcacgatcgaggacggcaaaacgcaggttctccacgtccatactgatgccatagcccataatcagcatcagaattaccgttcccagcagcgccagcgtcgagcgtaccggatcgcggcgtagctccagcgcttcgcggcgactgtagctgaacaaacgccggaagctcaatccctgccgcgacggtttacctgacgcggcgggcgtctgggatggcggtattggggtttcaggcgccgctcccgcagcttcctgtagccaggaaataaacgccgcctccagattggccgcgccccgctgttgcaccaattcctgcggcgtaccgctggcgagcactttaccggcgtgcatcaatgacattcggtcgcaacgttccgcttcgttcataaaatgggtcgagataaaaatcgtcaccttatcctgacgcgaaagatcgaccataagctgccagaacatatccctggcgaccggatcaacgccggacgttggctcatcaagaatcagcatttccgggcgatggatcaccgctaccgccagcgataaacgctggcggataccgagcggcaacgaagcggggagcgtatcttccacctccgttagcataaagcgttcgatcatctgcgcgacgcgcgccgggatctccgctggcggaatatgaaacaggcgggcatgaagttccagattctgccgcacggtgagttcgttatagagcgaaaaagcctgcgacatatacccgacccggcgacgggtgtcgatgtcgttcgggtctaccggctggccaaatagccaggcctggccttcgctggcgggaagcagaccggtcagcattttcatggtggtcgatttgccgcaaccgtttgaaccgaggaagccaaaaatctcgccgcgcggaatacggaaattaacatggtcaaccgcgacgaacttaccgaagcgcatggtcagatctttcgcctcaatggcaatctcttcctgctcagcgtgatacggcgggatcaccaccggcttatgcgcctggcgctgcgcttctggcaacagggcgataaacgcctgttccagcgtcgcgctatgggtttttgcccgcagttgctgcgcgctgccggttgccagtatctcgcccgcattcatcgccaccagccagtcaaaacgctccgcctcttccatataggccgttgcgaccaacacgctcatgttggtctggcgctggcggatactgtcgattaagtcccagaactgagcgcgggagagcgggtccacgccggtggtaggctcatcaagaatcagcaattccgggtcatgaatcagagcacagcacaaccccagcttttgtttcatcccaccggacagcttcccggcaggacggtcacgaaacggcgccaggccggtgctgttcagcagctcggtaatacgcgcttcgcgttcagctttgtcatgaccaaagagacgagcgaaaaaatcgacgttctcataaaccgataacgtgtgataaaggtttttccccagcccctgcggcatccaggcgatgcgcggacagacgtcgcggcgatgtttcgcatcgcgcatatcgccgcccaggacgataacgttcccttgctcaatcacccgcgcgccagaaatcagcgacagcaggctcgacttacccaccccgtccggaccaatcagcccgaccatactacgggcgggaatgtccagcgtgatattgttcagcgcgaccgtttttccgtaatgctggctcaccccctcaagctgcgccacgggaggaacaggcaccagcgtcagcgacgtcattgcgacagcctcacgcttagagcgtcaggccagggcacgcgctcatccagacgaacccaggccattcccggcaaaccggttttgacatattccagatgctgtcgcagcagctctggcggaatacgcgctttgacgcggaacatcagcttcagccgttcatcgtgggtttccacggttttgggcgtgaactgcgccacgctggcgacaaaactgatcgtcgccggaatacgcagatccggcgcggcgtccagcaccagtcgcgcttcgccgccgatcttcaacaacccagcctgttcggtcggcaggaaaaatgtcatataaacgtcgctgagatcgaccatgttcaacacccggccgccagccgataacacttcgcccggctccgcaacgcggtactgcacgcgtccatcgcgcggcgcttttaattcgctgtcgtcgatgtcggcgacaatacgccgctcggtcgcctgcgccgcttccacgcgcgtttgcgcctggataatactggtacgcgccgcctcaatcgccgcttttgccgcagatacctgcgctttggcggtctccagggcggcgcgcgcgctttccgccgccgcgcgatcgtcatctaactgttgtacagataccgcgccacgctgcgacagcgaacgggaacgcacgtgacgtttagagacggagtccagctcagcttcccgctgtttgacgaccgactgcgcggcgcgcatttcactctggcgttgctccagcaaggcacgggcggcggcaaccgcgctttcggcctctttaatctgcgcaatcgcctccagccgctgctcctgcagcacgcgggtatccattttcgccagcacctcgccctgacgaacgaactgcccttccgaaacgaggatggtatcaatacgcccggcaatcttagtggcaatatccacttcggtggcttcaattctgccgttgctggcggcaaacccctccggtattcccgcagggcgcagcatccaccaggctatcgcggccaccgccacaagaatccccgctccccaccacaccagatgacgcttcattttgtccataatcgacccgccgtaatccctgttgtctaaccatgcgtgtcacaaagtccgccgggcgtgcgctcagcgggggtttccattcgggataagaatgaaaaaagaaaaggggccagacgacgaacagacgccgatgaagcgctcgccgtcaaagggagtgaatgatgtaggtacccggaaaagagggagtaatgttgtcatcatcagcgttcctggccgtaaatgaaacacgcatactcataactgctataaatcgatactaacacctctgtccgggatgtctattcgcttattgtttgtaatggtacttagcgttttgccgccaaatcctgcgcacaggcccaggcgctcgaccaggcccactggaagttatagccgcccaaccagccggtgacgtccatcacttcgccaataaaatagagacccggcacgcggcgcgcttccatagtccgcgatgatagttcgtttgtatccacgccgcccagcgtcacttccgctgtccgatagccttcggtgccgttaggctgcacttgccaggccgtaagcgtgtcaaccaacgcctgctggtcacgaacgttcaactgcctgagcgatacatccgggatctgccccaactgttgtaaacactccaccaaccgtttcggcagatgcatcgccagcgtgttcttcagactctggttcgggtgcgcgttacgctgttcattgagaacgtcttccagcgagagatccggcaataagttaatgctcactaactcgcccggttgccagtagctggaaatctgtaaaacggcggggccggacagcccacgatgggtaaaaagtaggttttcccgaaataccgtgccattgcgggcggtaatcacgcagggcacagagacgccagacagcgtctggagctgttctaacagcggcttatgtagcgtaaagggcaccagcccggcgcgcgtcggcaacactctgagaccaaactgttcggcgattttatagccaaacggcgatgcgccaagccccggcatcgacaggccgccgctggcaatcaccagcttttgcgtagtcaccgtctcgccgttcaacgccagtatgaaacccgactcatcacgctcgacgctcaatacctcgctacgcaggcgcatcgttacgccgcctttgtcgcactcggcaaccagcatatcgacaatgcgttgggcggaatcatcgcaaaaaagctgtcccagcgttttctcatgccaggctatcccatacctgtcgaccagatcgataaaatcccactgggtatagcgggctaacgctgatttacaaaaatgggggttctggctcaaatacgcagcaggctcaacataaagattagtaaagttgcagcgcccaccgccggacatgaggattttacgtcctggcttcttgccattatcgatgagcagcacgcggctacccgcctgtcctgcctgcgcggcgcaaaacatgcccgctgcgccagcgcctataataacggcatcaaacctttccacgtcgccttcctctctcaaattcgggcgggaattgtaaagtttcctcagtggtcgcaccagcgcgaaaagcgcctgaaaatggtatttatctgaaatatataagataattctttagtgatatcaaacaaagcacgaagtacatcaaaaaaagtctatatttcactttgcccgcgccgccaaagtcactgataatgcgccgcgttcatgtcctcaaaatggcgtaacgtcctatgctacatttgtttgctggcctggatttacataccgggcttttattattgcttgctctggcttttgtgctgttctacgaagcgattaacggcttccatgacacagccaatgcagtcgcaaccgtgatttacacccgtgcgatgcgttcgcagctggcggttgtcatggcggcggtgtttaacttttttggcgttttgctggggggtctcagcgtggcgtatgccattgtgcatatgctaccgacggatctcctgctcaacatgggttccgcgcacggcctcgctatggtcttttccatgttgctggcggcgattatctggaacctcggtacctggtatttcgggttgccggcgtccagttcccacacgctgattggcgccattatcggcatcggtttaaccaatgcgatgatgaccggcacgtcagtggtggatgcgcttaacatcccgaaagttatcaatattttcggttcactcattatctcccctattgtcggtctggtattcgccggcggtctgattttcttgctgcgccgctactggagcggtactaagaaacgcgcccgtatccacctgacgccagccgaacgtgaaaagaaagacggcaagaaaaagccgccgttctggacgcgtatcgcgctgatcctctccgctatcggcgtggcgttttcgcatggcgcgaacgatggtcagaaaggcattggcctggtcatgctggtgctgattggcgtcgcgcctgcgggtttcgtggtcaatatgaatgcctccagctacgaaatcacccgtacgcgcgatgctatcaacaatgtcgaaacgtactttgagcagcgtcctgacctgctgaaagccgtcaccggcgttgaccaactgattccctctccggaaccgggcgcgactgaaccgactgaattccactgccatccggctaacaccattaacgcgcttaaccgtgcgaaagggatgctggcaaacgtggaaagctacgacaagttaagcgttgaacagcgtagtcagttgcgtcgcattatgctgtgcatttccgacacgaccgacaaagtcgtgaaattgcctggcgtaagcagcgatgaccagcgcctgctgaaaaagctgaagaccgatatgttaagcaccattgagtatgcgccagtgtggatcattatggcagtggcgttggcgctgggtattggtacgatgatcggctggcgtcgcgtggcgaccactatcggcgagaaaattggtaaaaaaggcatgacgtatgcgcagggaatgtcggcgcagatgacggcggcagtctctatcggtcttgccagctacaccggtatgccagtttctaccactcacgtactctcctcttcagtggcgggaaccatggtcgttgatggcggcgggttgcagcgtaaaaccgtgaccagcattctgatggcctgggtatttacgttaccggcggcgattattctttccggcgtgctgtactggctttccctgaagattatttaagccaaatgggccggatagcgctgtcgctaatccggcctgtcaggatgaaacgacacaggcctgataggccgctataagcggcgtcatccggaggcttatctaatacgagcgggtcaggaaactggcccgctttttttattcagtgccaaatcatgagcgcaatcaagctcaccaccaccaaaccgcataacgcgctggtcagcagaaactggcggcgcacgcgttcacaacggcgaataaattcttcatcatgatgatcgcgatagcgctgagcgtagatataccataccaggcgcacctgtttgttgggctgaccatgcgtggtaaagaagccgccgccatcgacatattgatagagcaaaggatcgcaaccacgaagtaccactaacagtgcgcgtagcgatgagaaatagcgcgccatattaacaatgcaaacgacacataaagcccagaatagtgagacggtgcttatcatatctcctccccggcgacccgcccacggagttcctctccgggactaccgctccccgataccctgccagacaatcagtgaaagagtactacgaaagccgtccatattagcgctccgcattcgaacggctcttatacacattgtaggagatcagttaatttttttaccagaaggttaatcactatcaatgcaattccctagaaattttgtttaactaactggcaagcaaggcagattgacggattatcctggtcgctataatgtaaggatagttatggtaaacggctgagctagccccgcgcatagagttcgcaggacgcgggtgacgcggcggcataagaaacgccagtagctcaatggtcatcgacaacttatggaaggagtaacactatggcttataaacacattcttatcgcagttgatctctccccggaaagtaaagttctggttgaaaaagcggtctctatggcgcgcccctacaacgcgaaaatctccctcatccacgttgatgtgaactattctgacctgtacaccggtctgattgacgtcaatctgggcgatatgcagaaacgtatctccgaagaaacccaccacgcgctgaccgagctgtctaccaacgctggctaccctatcactgaaaccctgagcggtagcggcgatttgggccaggtgctggttgatgccatcaagaaatacgatatggatctggtcgtttgcggtcatcaccaggacttctggagcaaactgatgtcttctgcgcgccagctgatcaacaccgttcacgttgacatgctgattgtgccgctgcgcgacgaagaagagtaatacttgccgtgccggctggcggctaagaccgcgtctggtctatagtcaatcaggttggcctgaaccatcaggcaaattccggctatcaacaacaacgcccgcttatgtgggcgttttgtttatccccccttcttcgcagtactcagtacatcattccatcacaccaaacataattagtgtgatccactaattagtttgcgtatcatttgtataataacctattgatcaggctaataaccgcagtctatatcagggtaagtcttttcggcgcgttttgatatacgcgctcatacgtttcgggatggcattaaaaggcgaaggaatatgaatacaactgcacctacgggcttgctgcagcaacctcgtccattcttcatgatcttttttgtagaattatgggaacgatttggctattacggcgtccagggcatcctggcggtctttttcgttaaacaattgggtttttctcaggaacaggcctttattacctttggcgcttttgcagcactggtttatggcctgatctccatcggcggctatgttggcgaccatctgttagggactaaacgcaccctggtcctgggcgcaattgtgctggcgattggctattttatgaccggcatgtcgctattaaatcccgatctgatttttatcgcactgggtacgattgccgtgggcaacgggttatttaaagccaatcccgccagcctgctctctaaatgctatcagcctaaagatccccggctggatggcgctttcaccctgttttatatgtcgattaacatcggttctttgttatcgctatcgctggcgccggtgattgccgataaatttggctatgcggtgacctataatctgtgcggcgctggtttaattgttgcgcttctggtgtacttcgcctgccgtggcatggtgaaaaatatcggttctgaaccggatcataaaccgctacgttttcgcaatttgctgctggtactactcggcaccgtcgtcatgattttcctctgcgcctggctgatgcacaacgttaagattgccaatctggtgctcatcgtcctttctatcgtcgtcactattttcttctttcgcgaagcgtttcgtctggataaaaccggccgcaataaaatgttcgtggcgtttattctgatgattgaagccgtgctgttttacattctgtatgcgcagatgcctacctcgctgaacttctttgcgattaataacgtgcatcatgaaattcttggattcgccattaacccggtgagttttcaggcgctgaacccattctgggtggtcgtcgccagtccggtactggcagcgatttacacccggctgggtagcaaaggcaaagatctgactatgccgatgaagtttacgctcggcatgttcctctgcgcgctgggttttctgaccgccgccgccgccgggatgtggtttgccgatgcgcaaggattgacgtcgccgtggtttatcgtgctggtgtatctgttccagagtctgggcgagttgttgattagcgcgctggggctggcaatggtcgccgctctggtgccgcagcatctgatgggctttattctgggaatgtggttcctgacccaggccgccgccttcctgctcggcggttatgtggcgaccttcactgccgtaccggaaaacatcaccgatccgttgcagacgctgcccatttataccggcgtctttagcaaaattggtctggtaacgctggcggtcaccgtggtgatggccattatggtgccgtggttaaaccgaatgattaatacgccaggtaccgaacagtaatactcagtgccggatgcggcttacgccttatccagcctacaaataattgagaatcgtaggcccgataagcgtagctccatcgggcaatccgttactccgtcagaggggttccggcataaatatcaaaccgatgccctttggtgacgatggcgttgggcgtcgcgacatccgccagcggcggcgcataatcgggacgtttaaccaccacgcgtttggtcgccaactgacgcgccggttccagcagtccgtcggcgtctaaatccggccccaccaacgactgaaacacccgcatctctttcttcaccagcgcgcttttctgccggtgaggaaacatcggatcgaggtagaccacctgcgggcgcggcgtgatatcggtcaacgccgtcaggctggaagcatgaatcaactgcaaacgctcctgaagccagccgccaatgtccgcatcggcgtagccgcgcgtcagaccgtcatcgagcagcgcggcaaccaccgggttacgctccagcatccgcacgcggcaaccgacggacgccagcacaaacgcatcgcgccccagtccggccgtggcatcaaccacatccggcaggtaatcgcctttgataccgacggctttcgccaccgcttcgccgcgcccgccgccgaacttgcgccggtgcgccatcgcgccgccgacaaaatcgacgaaaataccgccgagcttcggttcgtcgcgcttgcgcagctccagatgttgcggcgtcatcaccagcgccatcgggttgtcttcgtcatgctccagtccccagcgggcagccagaacagataaggcgccgtctgtggcgcccgtttcatccattaagcagatttgcacgtaaaatcagcctttaatcccgtaatgctccagcatcgcgtccagttgtggttcacggccacggaagcgtttaaagagttccatcggctcttcagaaccaccgcgagtcaggatgttatcaaggaacgactgaccggtctcacggttgaaaatgccttcctcctcaaagcgggaataagcgtccgccgccagtacgtcggcccacagatagctgtagtagcctgccgcatagccgccagcaaagatatggctgaacgcatgtggaaagcgaccccatgtcggtgacggcaccacggcgacctgttttttaatttcaaagagcgtctcaagaattttcgctccttgctgtggattaaattccgcatgcagacggaaatcaaacagaccgaactccagctgacgcagaataaacagcgccgcctgatagtttttcgccgccagcattttatccagcagttccttcggcagcggttcgccggtctcatagtggccggagataaacgccagcgcttccggctcccagcaccagttttccataaactgacttggcagttcgaccgcgtcccacggcacgccgctgataccggagaccccggcggtctcaatgcgggtcagcatatgatgcaggccatgaccaaactcgtggaacagggtgatcacttcgtcatgggtaaacagagcgggtttaccgttcaccggacggttgaaattacaggtcagataagcgaccggcttttgcaatgtgccgtccgctttacgcatctggccgacacagtcgtccatccacgccccgccgcgtttgtgttcgcgcgcgtacaggtcaaggtagaagctgccgcgcagctcgttattttcgtcatacagttcaaagaaacgcacttccgggtgccagacatcaacgtcagtacgctctttggcagtgatgccgtaaatacgtttcaccacttcaaacaggccattcacggctttgttttccgggaagtacggacgtagctgctcatcgctgatgctgtacaggtgctgtttttgcttttcactgtagtacgcgatatcccacggttgcagctcctcaacgccaaattcggctttggcgaaggcgcgcagctgggccagctctttttccccctgcggacgggcgcgtttcgccaaatcggttaagaaatcgagcacctgctgcggattttccgccattttggtggccagcgattcatgggcataattttcgaagcccagcagttgcgccagttcatggcgcagcgcaagaatttcttccatcaccgggctgttatcccacttaccggcgttcggcccctgatcggaggcgcgagtggaataggcgcgatacatctcttcgcgcaacgcctggttgtcgcagtaggtcatgaccggcagatagctcgggatatccagggtcagcaggtaaccttcctgctctttggcttccgcctgggctttagctgccgccagagcgctttccggcattcccgccagctcggcttcatcggtgatgagcttcgtccagcccatagtggcatcgagcacattattgctgtactggttgcccagctcagacaggcgagtggcgatttcgccgtaacgctgctgtttctctttcggcaggccgatgccggacagttcaaaatcacgcagcgcgttatcaaccgctttcttctgcgcggtattcagagtggcgtaatgatcgccgtcgcgcaggtcgcggtacgcgttgtacaacccttcatgctggccaacccaggtgctgtattccgacagcagcggcagcgtctgttcgtaggcttcacgcagctccggactatttttcaccgagtttaagtggctaattggcgagaaaatacgccccagaacatcgtcggcttccgccaacggctggcagaggttttcccagctatacggcgcgccatgcgccacaacgccttctaccgccgcccggcaatcggccaacgctttggtgaccgcaggcaccacatgctccggtttaattgcagaaaaaggcggcagtgaaaaagacgttagtaatggattggtcatatgcgcagtcctgtagaagaaggtgagtggagcgcgcttttggcgctctcgcgatgagatctagaatgggggatagtaaggggaatttcaatgatggacagcgtacagacgtgggtatcgctgcaataagccgcccctttaacatcatcccggcttacgttttataagccgggtgacaacgtcagcgcgtttttctcgccatctcgtaagcagcggacagatccagacgctgccagaactgttgatcctcggtctcgcccgacaacggatatcctgccggtaacgccgtctcttccattaacgcctgacgctgcgctggcgacaggttcggcagcgctgtctgtagcagaacatcggcgccttttggtattttcaacggctgatgctcgcctttctgttgcggcaggttataagtcatggtgaagcggtagaaggtatgcatggccggatcgcggtacggatcgtcttttccggtcgatgccgcgcattcgacaatcgtcgtaccgcactctttcaccagcgcctcacgcagttgagcgcgagcttcgttgaataacgtacggtaatacggatcgttaagataatgcgcgacattacgctgcgcgaccatccgcgcgcccatcacatccagcggatagtgtacgccaaggaccaggcgagaatagccataacgcgcgccacgaatcaccagcgcatcaaagcgttccgggatcatttccgccatcaacagcgcatccgtataaccggtattcgtgtgtccgctggggaaagcaccgccacctgcggtataaggatgaccatcttttaccaccacatcatccggcgtcaaatggatagtattacccggcacctggtaaggacgcgggtaatgaaaatattttttcgccgcgccggtgctgacttccgaggctttaatcaacgccgccgctttgcccaactcacctttatcataagcggcgagaaatgcccgccccagccgcggccccattgcgtcgctcaggaaatagagatactccacgctttccgcatccgccagcgcctggtgacgggtattaacatcggcatcgtgattaatcgccgtcaccgtcgccagattgtctttcaatactgcttccggcaatgtattgaaggcggaaagtagggtaatccccatctgttgattctcagtagtatgaaaatcataaccgctagcctgtaaccaggcattatccgcctggatggaattctgtcgcatctgagccagggcgtcgcgagtcaacgcggcggtatcgccttgtaatgccttacgcaactgtgtcagccattgagcctcaaggtcattaaaggcgacgctcgccgagtcgggcgtcacgcttttcgctatcgactccgcctgggacaggggaatatctttcgccagtgccggcatcgccagcgccagagatgacgccagtacagtaatgtgtagtttcattatggttcctttcattaaaaataacgccaggtcaaaactactaccttgcccacaggcgatgctggcctgcgcagttgacggtttgatgatacgaacacgtcttgcaatactttcacaacgcgcgaaacaacatggcggtactggggtaatctctacggatctgcggtaaactatcggctaacttgtttacttcccggaatatctgcatccatgctcagttatcgtcacagctttcacgctggcaaccacgccgacgtccttaaacataccgttcagagcctgatcatcgagtcgctaaaagagaaagaaaaaccgtttctctatctggacacgcacgcgggcgcggggcgttatcagttgggcagcgaacatgctgaacgtaccggagagtatctggaaggcatcgcccgtatctggcagcaggacgatctgcccgccgaactggaaccgtatattagcgtcgtaaaacatttcaaccgcagcgggcagttacgctactatccgggctctccgttaatcgcccgccagttgctgcgtgagcaggacagtctgcaactcacggaattgcatcccagcgacttcccactgttgcgcgcggagtttcaaaaagacaaccgcgcccgcgtggaacgcgctgacggctatcagcaactgaaagccaaattgccgccggtttcccgccgcggtctgatcctcattgacccgccttatgaaatgaaaaccgactaccaggcggtagtcagcggcatcagcgagggttataaacgtttcgccaccgggacatacgcgctatggtatccggtggtgctccgccagcaaattaagcgcatgattcatgagctggaggccaccggcatccgtaaaatcctgcaaattgagctggcgatccgcccggacagcgatcagcgcgggatgacggcgtccggtatgatcgtggttaacccgccgtggaaactggagcagcagatgaacaacgtgctaccgtggctgcacagcaggttggcgccaaacggtcacggacacacttcggtaagctggatcgtgccggagtaatcacagccatcggtggaacctttcaccttcaggtatacaatcgcgaatattttggcgggtagcgcagaatctatccgtccgacaacgaacataaaggagcggtcatgaccaaacactatgattacatcgctatcggcggcggcagcggcggtatcgcctcgattaaccgcgccgctatgtacggccagaaatgcgcgctcatcgaagccaaagagctgggcggcacctgtgttaacgtgggctgcgtgccgaagaaagtgatgtggcatgccgcgcagattcgtgaagcgattcatctgtatggcccggactacggttttgacaccacgattaatcagttcgactggagcaagctgattgccagccgtaccgcgtatattgaccgcatccatacttcatacgacaacgtgctgggcaaaaataacgtggatgtgattaaaggctttgcccgctttgtcgatgccaaaaccattgaagtgaacggcgaaaccatcaccgccgaccatattttgatcgctaccggcggccgtccgagccatcctgagattccaggcgtggaatacggcattgattccgacggtttctttgcgctatctgccttgccggagcgcgtcgcggtggtaggcgcaggttatatcgccgttgaactggctggcgttatcaacgcgctgggggcgaaaacgcatctgtttgtccgtaaacatgcgccgctgcgcagttttgacccgatgattagcgaaacgctggttgaggtgatgaacgccgaaggcccgcaactgcatactcacgccgtgccgaaagcggtggtgaaaaacgccgacggcagtctgactctggaactggaagatggccgcagtgaaaccgttgattgcctgatctgggccattggtcgcgaaccgtcgaccgacaatattaatctggcggcagcgggcgtgaaaaccaatgaaaaaggttacatcattgtcgataaattccagaataccaacgttgaaggcatttacgccgttggcgacaatactggcgcggtagaactaacgccagtcgccgtcgccgccggtcgccgtctctccgagcgcctgtttaacaacaagccggaagagcatctggactacagcaacatcccgaccgtggtctttagccatccgcctatcggcaccgtcgggttaagcgagccgcaggcgcgcgagcagtacggcgacgagcaggtgaaagtctataaatcatcgtttaccgctatgtataccgcggtaacgacacaccgccagccgtgccgtatgaagctggtctgcgtcgggccggaagaaaaaattgtgggtatccacggtatcggcttcggcatggatgaaatgttgcagggcttcgcagtggcgctgaagatgggcgctaccaagaaagacttcgataataccgtcgctattcacccgaccgcatcggaagagtttgtgaccatgcgttaatatcttgtgcgcccatcttcaagggtgggcgcacaagcctgcatgattaatacgtactgaaataactctggatcagttccggattacgcgtctgagttaatgccgtcatcagcaagactcgcgccttcgccgggttgagcgagtcagacaccagccctggctgccctttatccaacggtacgacgccgtttccggtgcgggaagcgcgcaccacgataatcccggctttctccgcttttttaatccccgcgtcgctgcgtaccgagaccgaacctgcgccggttccggcataaataataccgtccgcgtgatgggcgatcgccgcatcatacatatattccgggtcgtcctgatagccgtaaataatcaccacattgggtaattttttgatattacgtacgtcaaaaacagatcgcagggtatgaattttttccacccgcgtttcgaactgtggctgaccattaacgatgacccccagatagccctcttccggcgctttaaaggtatccagagtcgtggcattagttttcgtcacaaagcgcgccgaaccaatacgatcgtttaaaaccaccatcacaccgcgtcccttcgcattcgggtcagcagccaccgtgaccgcttccagcaggttcattgcgccatcggcgctgattgccgacgcgggccgcattgcagcggtaaacaccaccggtttgtcgcttttcacggtcaaattaagaaagtaggcggtttcatcgagcgtgtcagtgccatgagtaataaccacaccgtcaacatcgtcccgcgccaataacgcattcaccttctgtgaaagtttcaggatgatatcgctggtcatattttcgctaccaatattcgccacctgctcgccgtcaacgcgagcgatattattcatttccggcacggcatttattaatgtttgcacgccaagttcaccagatttatatccggcggtttgcgtattattggctgccgtcccggcgatagtaccacctgtcgcgagaataacaatatgcggtagtgacgttgtgctaaatacacagtggctgatgagcagcaacacggtggccatgaaaactctaattttcattttcttcctctgaattaaaaataataagtggcgtgtgctataaaaacatgaataacaatcaggccagaaccatttttcctattaacagcccgacaatgaccgagacaatcacgttaactaatcccggacgcataaaactatggttaagcacatatttgccaatacgcgtcgtaccggtatcgtcaaacgccagcgccgccagacactgccccgccaccggaataaagaaatagccgttaacggcaggccaggagccgattaatgcataagcgggcaaccctaacgccagccccagcggcaacagaattaacgtcgttgccgcctggctgctgaccatagcggacacaaaaaacatcataatggcgataagccaggtatgctgttgcaatagagtttgcacttctgccttaatcaacgcgatatgaccattcacgaacgtctcactcatccaggccaggccgaaggcgcagacaatcgccagcgcgcccgcccgaaataccgtaccgctgataatttgatcgacctgcggtcggcataacaacacaatcaggcaggcaaaagagagcatcgtaatctggatagcggcggacatcgaaagcggttgtagccctttcgctgtttccaccatgggccgcagcgccggaatcagtcctaacagaacgataacgatcgcactggtcagaaataacgccaccgacaatttggcgcgcgaagtgaccaccgtatttttactttctttctgcgcaggtttaattaacccttcagcaagccgacgttgatattccggatcgtcttttaactcttttcctttattaaaggtcgctattgcccccatcgctacgccgattaacgtggcgggcacgcaaatcatcataatggttgaaatagagacgcccaacggcgccattaaaccaatcatcgccgccatggcggcagatataggactggcggtgatcgcctgttgcgatgcgataacggaaatagataaaggacgttccggtcgaatacctgaatcccgtgcgacttcagaaataaccggtagcaagctataaacgacatgccccgttcctgacataaaagtgaagatataacagataaacggcgctaataacgtaatgtaacgcgggtggcgacgcagaattttttccgccagtttgaccagtaaatccagcccgccggaggcctgtaaagaagcggccgccaggacaacagaaagaataatcagaataacatcaatcggtggcgtagaaggcgtcaggccaaaaataaaaaccatcacgccgacgcctaacccgccgaccatccctaaaaatacgccgccgatcctggcgcctatcatcagggccacaaggataaaacataattccgtccaaaacatacttcctcctgggttatctggagtgagtgtcgctttacattgagggacgtaacctattgtgcaaacggtttaccaaaaccaaatgcgccgtaatgagataacacctgcgccgccgatttcccgccctgccgcatggcgcgtaacacgctttctttatcgggttccgccatacccgattgcaaaatggaaagcaaaaaaccggttaagaaggcgtcgcctgcgcccagcgtatcgacaggttcgatataagcaggttgccactccagataatccgcgccggaaaaataataaactttttcatgcccgcaggtggcaataatatgccgacagccataacgataaagtttattgagttttactttgatttcatctggcgataacccgctacaggagataaatccgtaatctacccacgggcataccttttcaaaatagtcgtctgtaccgcgcccggaaaaatcaaaagagagtaagacggtttgttgtttaattttctccagttccgattccaggtggccgttaatactggaatggactaaggtaaattgtgatatatagcgaagatcgtcgtcagacagactaaaaggatgttcccgcaatacgccgtttttgttgctggcgacaaattgccgatcgccatgcgagagacggatacaggcatacccattttcgccggtataatggcggctgtgagagatgtctatctgtagctggtgtaatacatcctgtacgtgctgcgcggcgtcgtcattgccaaacgcccccataaacgcgctggggatgtctgctaatttcgcatagacagcaaaatttaatgcattaccgccggggtacatgatgccggaatgcaggtatttatcgacaacgttgtcgccaatacccaatacgctgatgctcatcattattccttgtttgtctttacaataaaaagcgtccctgcttttttatccatcctgatgtaattaatattccactttccacatatagcggcgcgtcgttaacggatgctgacgcgcctcagctaacgcccgattgtaaacgggataaacgttattaaagagagagtggttaaagtaatcaataaccgtggttttaatggtcgatagccccagttctttcgcatcgacaacttcaatccggcggccatattttttcaggaagtttaacgcgcgttcatccaccgcccgcgtattgccctcggaaaactggaagaagaaaggcgtattcgcatcggtaatttcaaacggcccgtggaaaaactcaccgctatgaatacaggcggaatgtatccattgcatttccataaagatgcagatgctctgtaggtaggctgcgccatagcccgcgccgctggcgacggtataaatgactttatcgtctttatattcctgcgcgaacgcctgcgcacgctccgctacctgctcgcaagcgcgccagacgatacggttgattttgctgacgccatcctgaaaatcgtcgtagtgcgcatacccttccgtctgctggagcagttcgaccgcactcagcaggcctttcatcgttttctctccggcaatatctttaccgtcgccaaacgtgtacgtttccacatagtcgcaatgcgccaccaacggtgaatccattatccaggttaaaccaatgaccggcgcgccgtgctgacgggcgatttcagccgctttaattgtctctggcgtattacctttgtgggaggcgacaaccacaacggcattttctcccagcgctaccggcgggttgttaataaattctccgctgttatacagaccgacagtcaacgctttcgcttctttttctaaaaatgctttcgccggatagaacgccgcataagaaccgccgcacgccacgtaatagacgtgtttaacgcctcctttctctgcctggctggtcacaatattgctaactgtctctttcatacccatcatgctttcctctggttccatcaatgatacaggcgaggattcgccataaatgactcataatgtattattatttttatatgacatttaaagacatttgatcaagatggaaaccaaaaaaaatcgggatccgcgatctggatcccgattcagcctgctcttcgttagcgtaatgctgacatcatacggtaaaccgtattttatcgccgacaatcaactgttgcgaaacgcaggagagttctcctttgttatcaatcatttcactttttatcaggatcagcggataaccctcgttgacgccaagataatgggcgacttcaaagctggcataaaccagttcgatcatcttacgggagtgggtaaaccataaatggtatttctcgcgtaagcattcatacaaagagtgattattaagatcttcgtccagcaaaaacgcaaaacgtgggggaagatgtacggtttccagcgataccgccacatcgtcggcatagcggatacgttcaatgacgaccgctttttcgccatcgttcatattcagtaacgcttttgtctcatcgtctaccgattcaaaaacggatttgatggtgcgtgaccccgggcgacgtccctgggactggcataactcgctgaaactcatgatgccggtcatgctgcgctgaaatttctcaccagagacaaaggtgcctttgccggagacacgggtcagcaaattttcacgcgtcagcgcatccagcgccttacggaccgtgaccctgctcacctgccagcgcacgctcagttcattttccgtcgggatctgctggcctggtttatactctccacgcgcaatagcctcttttaaggcggcttcaagctgcttataaagcggtttggcgcttttactgtcgggttgctcgatcatttgtatccatttgtattatcatgatgccatagcttgtattataactatttacgttacctttgcttgtgaatccacgccatgcggtgacgtagtgataccgctatgaaacgaatgttctgattttaggtctggggcgggcgtcatgaaaataggattttcgcaatactattcagtaagttatgaagtgtttttcttgagagacaaattgcaaaatgtgatctatcgcacactttgccactcaggtatcgaagcgaatgtctacgcttaatagacagccgggcaacacccgtatcttttacgacgcaagccggaggtccttgtcattatgctcaaccagaaattaaaccccacgccttctgaagatctgactattgatgtcgatctgctttatgaaacagacccgtgcgagttaaagctggatgaaatgatcgaggcggaaccggagccggagatgatcgaggggcttcccgcctctgacgccctgacccctgccgatcggtatctcgaactgttcgagcatgtacagtcaacaaaactgtttccagacagtaaaacgttcccggactgcgcgccgaagatggacccgcttgatatcctgatccgctaccgtaaggtcagacgccaccgtgattttgacttacgccgcttcgtcgagaaccatttctggctaccggaaaccttatccagcgagtatgtctctaatcccgaaaactcgctcaaagaacatattgaccagctttggccgatactgacgcgcgaaccgcaggatcatattccgtggtcttcgctgctggcgctgccgcaatcctatatcgtgccgggaggccgttttagcgaaacctattattgggactcttattttaccatgctgggtctggcggaaagcgggcgcgaagacttacttaaatgtatggcggataatttcgcctggatgattgaaaactatggccatattcccaacggcaaccggacctattatctgagccgttcgcagccgccggtttttgccctgatggttgaactgttcgaagaagatggcgtgcgcggcgcgcggcgttatctcgaccatctcaaaatggaatacgccttctggatggacggcgccgaatcgctggcgctcaaccaggcttatcgccacgttgtgcggatgccggacggttccctgctgaaccgctactgggacgatcgcgacacgccgcgcgacgagtcgtggctggaagatgtcgaaactgcaaaacactccggtcgtccgcccaatgaagtctaccgggatttgcgcgccggggcggcgtccggctgggactattcttcacgctggctacgcgatgcgggccggcttgccagcatacgtacgacccagtttatccctatcgatttgaacgcttttctgtataaactggagagcgctatcgccaatatttcagcactgaaaggcgaacgtgacaccgaggcgctatttcgccagaaagccagcgatcgacgcgccgccgtgaaccattatctgtgggatgatgaaaacggctgttatcgggactatgactggcgacgcgaagaaatggcgctcttttccgccgccagtatcgtgccgctgtatgtcggtatggcgaaccacgagcaggccgaccgtctggcaaatgtggtacgcagccgtctgttaacgcccggcgggattatggcgaccgaatacgaaaccggcgaacagtgggataaaccgaacggctgggcaccgctgcaatggatggcgattcagggcttcaaacggtatggcgacgatatgctgggcgatgaaatcgcccataactggttaaaaacagtgaaccatttttatcaggagcaccataaactgatcgagaaataccatatttccggcggtacgccccgcgaaggcggcgggggcgagtatccgctacaggacgggtttggctggaccaatggcgtggtgcgccgcctgattggcctttacggagagccttaacctgctccggcctcagtgaatcgcatcataaatggctgactgaattttcagccattttttattgtctgcgctgggccgggcctgagcgcgcaatcgggcctgctccgtatcgtgctgctggcgcgtcacaacagccggaacggtgcaaaacgtttgcaaataggttttatgcatcgcggtcagcggcgcgccgctcgacatgtcatgacttaacgttgtgataaatcgtcggcagggtttgacctcatccatcagcgcgggataacgcaacaacagttgcagcacctcggtatgtcctgccgcaaacgcctgctccgtccacgcgagctgccagttcattccgccctggaggaacagcgccgtcacccgcgtatcattgcgctctatcgccgcccgcatggtaaacgcatcccaggtaatccccatatgattgagcgtttcccgcgcggaaggcgcctcgcgcggcggttcatcctgcgccattgcgggagcttgcccgttatcggagcctggcgacgacgaactaaatagccagaacgcgcccgccagtatcgccagcgtcatgacgccaaccgcgccccacaaagcgccggaaataagttgctcacgctcttcaggcgtacgcggaggccgcttacgcggtggttctatgctctcgctaatctcatgcttatctcccccggcctgccgatctttaagccgcgcggtttcccagaactggcgcaattcacgttcatccgccagcagaaacgaagcgggattcacgcgggtacgtttttcggcataggcgcgctggatgggccgaacgatttgctgatactgaacgtttagcagcataagctgcgctgaggtaagcggctgcctggcgataacctcgtttcgcgcaaggcggcaatcatccagaaacatacgcagagtggtgcgcgactcggcgaacagcgttaacgctgaggcatcattaaaaattctgacgtaatgacgggcaaacaattttttatcgaccaccataagcgccagttcgctgaacaacatgccctccagcgcatgttgatcttctccctgttttaaccactggcgcaaacggtccgggccgaaatgttgcttgaggtagtgattcagcgacgcccgatccggccatgcgcgcgcaataagcgcttttaacgtcagttctatcgcccgaagctgacgctgcgcctcaagatgcgcctcctggtcgggttcttccagctcagtttgatacgtcagtagcggctgctgctgacgtagatgctccagcgaggtgacaaaacgcaacgcggcaaggagttgattttcgctcacctcttgcccgctgtcatactggggaacatgctgctgaaggtgacgcagttgcagcataaactggctcaactgcgcgtcatttatccgcaattttttcgccaccgcgccccaaccgcccaggttaagacgcgcctgctcaagttgttccatgaaccaccggggctcttttccctctgtggtatgaatacccagcagcagcaggatttctattgatgcctggcggataatccccaggctatgttcaaaaggcgcgcgtgtcgcctgcgaagcgctattcgtcattatcttccctaaaaagacgatcccgcgacgagatcttcgttttcttttaattatgttttttcatagatataacagatttagccacatttcagtgacttaatcttaatgattgcaaatttataagaagatcggttactaaccaaaaacatcagtttttcattctgtcaacgcggcgtgacgctgaacggcatagaccttttccctgcctgcgtttggccgtctgaccgctagccacgcgtgcagcacactttataatcgcgctttttatgagaaagatgccatgccgcacatttcatctcgctttagctccgcctgcatcgcgtttattaaacagtggcagggtctgtcgctggaaaagtatcgcgatcggcagggtaactgggtgattggttacgggcatatgttgacgccggatgagacgctgacgttcattacgcccgaccaggcggaggcattcttgctggatgacctcaatagctgcgatattctgctacagaattgcttgccggaacttaacgatcggtttcaacgcgaaacgcttattgcgctgatgttcagcatcggacatcagcgttttttatcattaatcaatacgggtgatatttcacagccagaaataagcggactgcgaatttaacgtcgttaattcgattcatttaacatcatggcggcctgggtacgattttttacatccagccgccggtaaagcgactccagatgcgctttaaccgtcccggtactaatatttaacgcccgcccaatttgtttatttgattctcctgcggcaagcatctgtaaaatttcccgctggcgggcgcttaacgcttttatatcacgggactccagctccgttgaatttaaccaatcccccggtaaaaacatcatcccgcgagcgacagcattgagcgcaaggacaaaggtttcagcatcagaatcgcgtggcaccacggcctgaacgttaaattgcatgacttcatgcagccacttttgactgccatccatcgccgtgataataatcttcacctccggaaattgctgcgcggttctttgtaacacctcgcggcaaaactcagcatccaggccgctatccagcatgaccagcgcatccggcgcgctttctattttttgccagagttcttctgcctgaccgacactctggatacttattcctggaatgtgctgctgcaaactgattttcattccatgaataaatattgactgcctgtcaaacatgattacctgcattacttttctccacctgggtaagataatagtctcaagatgaggaagggtattacccgtagggtaaaataagaagtcgccatttggtataggccattttaccgatagtcattggttgaggaagggaaaggttatgaatatttacagcttcaacatcgggattacagaattcgctaaaattagccttttaaagtaaggaatatcttattagcgcgaacagctaaggctaatttgaatattaatttaatgaagagtacgcctggcgcgtcacaaaggaaatatctgcttttcgcctgatgtgttacaaaaaataaagtagcacattttgttaaaaaatagccaatccgcctgaaaaccgcgacgatgggtcaatgacaataccgtgtatgtacatgcatttctctgccccactgcacccgctgttatcggcgtgttttaccgccctcgccccgtttatcggctttttggcgctaaaatgcctggccggaaggcgataaatccgccgcgcaacgcgatcagacgtattcgtcacgcgagcaatgattgcgaaagggcttattaggtgctagaaaatcaataaaaccagccgcttcagcgtcactgtttcaataagaacaataatagagcctgatgatggataaaatatatgcaatgaaattgtttgtacgcgtggcggaacgggaaagtttttcccgtgcagcagaggatatcggccttcccaaaggcagcgtctcacggcaaatacaagcgttagaacatcaactgggcatccgcctgctccaccgcaccacccggcgggtacagcttactcaggacggaatggtttactacgaacgggcaaaagatctgttgagtaacctggatgaactggagggtcttttccagcctgatcccgccagtatcagtggcaaaatacgggtagatataccgccatgtctcgcaaacagcctcatcatgccgcgcctgcccacttttttgcatcagtatcccggcattgcgctggaactttgtagtagcgatcgacaggtcgatttactacgggaagatttcgactgcgtggtgcgcacagagccgctacatgcgccagggatactgacgcgcccacttggcaaactgaggagggtgaactgcgccagcccacaatacctggcacgctttgggtatccagaaaaccttgacgatctcgcctcacatgcgatggtgcattattcattgaccccgggagtctcttcaccgggttttgcctttgaaactccccacggtatgcagtgggtaaaaaccggcggaatgctaacggtaaacagtacagagacctggcatacggcctgtctggcaggattaggaatcattcagacgccgcgcattgctgtacgggaggcgttacgcgccggaacgctcattgaaattttaccgcaatatcgcgccgctccactgccggtgacgctgcattatccccatcgccgtaatctttcccgccgggtacacctgtttatggtatggctgacggaaaccattaaagaggccgcagagtagccgcattttcagcatccaccggggagaagctatactgacatattctattaatgatgaaggactaccgacctgatgacgcaggaaaatgacgtaaaacgccctattcaggaactggagcacgacccgatacaaaaaatagaaacgcagccgcatgacgccccggaaaaaaacgaaaaggcaaatcaggcgttgcattccgtcaccaccctgatgcaaaaaattcagcgtcaaccaatggtggcccacctcattcgcgcgaccgaacgttttaacgatcgactgggtaatcagtttggcgcggctatcacctacttttcgtttctgtcgatgatcccgataatgatggtgtcctttgccgcggcaggttttatcctcgcctcgcaccctaatctactggaagatattttcagcaagatattgatgaatgtgagcgatcctacgctggcgtccacgcttaaaaatacgattaatacggcggttcaacagcgtaccacggtagggctggtcggactgggtatcgcgctctattccggcgttaactggatgggcaacctgcgggaagcgattcgcgcccagtcacgggacgtctgggagcgcaagccgcaggatcaggagaaaatctggctcaaatatctgcgcgattttatctcgctgattggattattaatcgctttaatcattacgctgtccattacttccatcgccggttccgcccagcagatgatcatctccgccttgtatctcgacagcatcgaatggttaaaaccggcctggcatttgatcggtctggccatctctatttttgccaactatctgcttttcttctggattttctggcgactgcctcgccatcgtccccgtaaaaaagcgttgattcgcgggacatttattgccgctatcggttttgaggtgattaaaatcattatgacttatacgctgccgtcactggtgaaatcgccttccggcgcggcgtttggctccgtactcggtctgatggccttcttctacttttttgcccgcctgacgttattctgcgcggcctggatagccaccgccgaatacaaggacgacccgcgaatgccgggtaaaacgcaacgctagtctgcggcttgctgccgaatggcacgcacggcgtcgtcattcggcctactgatgtgtagacccaggccgggcaagcaaagcgtacccggcggtacaatcaggcacgtccttccgcctcatctcattgtttcagcatataaatccagtaattaacttttatttaaccagaaaccagttttatccaccaattctaaaattatgtgaagcatttcatagacgcaaaatggctggcttaaacattatcccctttttgcgctttttttgaccatttttagcttttgttacacattgaaatataacttttgctgtgcgtaatatggctattcgttcgctaaaaataagaaaatagtatgcaagcaaccgccacaacactcgaccatgagcaggaacatgttccggtaaactcacgcaataaagtcgttattgcctcgcttatcggcaccgcgattgagttcttcgacttctatatttacgccaccgcagcggtgatcgtgttcccccttatcttcttcccccagggcgatcccactgcggcaacgctacaatcgctcgccaccttcgctatcgcgtttgtggcgcgtccgattggctctgcgctattcggtcacttcggcgaccgggtaggccgcaaagtcacgctggtggcttcgctgctgacgatggggatctccacggtcattatcggtctgttaccgggctacgcgacgataggtattttcgcgccgctgctgctggcgctggcgcgtttcggtcagggactggggctgggcggcgaatggggcggcgcagcgttattagcgacggagaatgcgccgccgcgcaaacgcgcgctgtatggctccttcccgcagttgggcgcgccgatcggcttcttttttgccaatggcaccttcctgttgctctcctggctgctgaccgacgagcagtttatgagctggggctggcgcgtgccgtttatcttctcggcggtgctggtgattatcggcctgtatgtgcgcgtgtcgctgcatgaaacgccggtgtttgcgaaagtcgccgcagcgaaaaaacaggtaaaaataccgctgggcacgttgctgacgaagcatgtccgcgtaaccgttctcggcacgtttattatgctggcgacctacacgctgttctatatcatgaccgtctattccatgacttacagcacggccgccgcgccggtggggcttggcttgccgcgcaatgaaatactgtggatgctgatgatggcggtgattggtttcggcgtgatggtgcccatcgccggcctgctggcggacgcatttggccgtcggaaaagcatggtcatcattaccacgctcatcattctcttcgcgttgttcgcctttaccccgctgctgggttcaggcaatccagcgctggtattcgtgttcctgttgttaggcctgagcctgatggggctgaccttcggcccaatgggagcgctgctgccggagctatttccgacggaagtgcgctataccggcgcatcgttttcctacaatgtctcatcgattctgggcgcttccgtcgcgccgtatattgccgcatggctgcaaagccactacgggctggcggcggtaggggtttacctggcgtcaatggcggcgctgacgctgattgcactgctgttaacccatgagacgcgtcatcaggcgttgtaatagggcgccggatggcatcatccggcgctacgtttcacgttactgcttcatctgcgttaaaatcgtccggcactgattggcttcgccttcagagggcgaaattagcgccaatagcgcggcggcgggcgttaccaacgtcgccagcgctgccgcaaccgcgccgcgcgcaatcagcgggccgggcttgacgcccgcctgcggatttttaaatgtcccgcgcacgtacagcggcgatcgcagcgtaataatacgaatccccttactttccggatcaatggttaaatcgagctgttcagaggcgaagctcgccgtaccggtcacgttaatcaacgcattttctgtatcaaaagcaaaaatttgcggtcgcgccacgccgttcgtaatattgagattcgccgccgcgcagttaacccgcacttcgtcatcgccaaaaatctgcccgacaatatagttgccgacgttcagccccacgatttccatcaggttgcggctaatcaatccatcattcatcaataacttcagattgccgttactgttgccaagcagcgcggcgaccgagttgcccgtcccgcgaatatccgcatcgccgttcagctcgcccagcgttttctgcatcagctccacatccggcatcagttctttaagcttcagccgacgcgcctgtatatccgcccgcccctgcattggctttttatccccttccagatggatgttggagacaatactgccgcctgccagaccaaacttcagcggctgtagacgtaagtcggcgtttttcaggatgatatgggtcgaaagatcgctaatcggtagactgccgccatgttcaatacgtcggcctttaaaccggacatcggcgtccataacgtcccatttgtcggtttcaaagcgatcgtaaggcaacactttatccgccggctgaacattcttctcgcctttgcgctgttcagaccgtttcgactgctcagcgtctttcccggaatccacgccaatcagcggcccaagatcggccaggcgtaactggcgcgattcgacatcgccttccagtttagggcgcggtttaccggtggtataagtgagggagccgtggatatcactgtcgccaatgcgcccgttaaaaccgcgataatcaaatactgatgacttttcggcgtcaattttcgccaccaatcgcccatcggtctcaaacggcggcgtatccggcagcagcacgccggttaaatcatataaatcgcccagtgaatcgccagagaatttaagccgcagatcgacgccgcccattttcatcggttcgttcaccacgccgctaaaagccacccgcgtattaccagagcggaaatcggcctgcacaggaaaaggcgtactttcgctgcgtagcgccagcataccgcctattttccccgtaccggtcaacggttccccgttataacgcccctgcgccttcaggccgaagacatagtcgcccacggtggatttgtctgctttgcctttcgttcccgtcacttcgctgaacggcaacggtttgcctaacggatcgatcagaatagtgatatccgccttgctgaccttatcatcgatcgcgattcgcccctggtcgaagagaatattatccagccggaaggaccaggcggaaggtttagcattggggtccgtattcttgtcttgcgcgaggttaaaggtccagttattggttttctcggacagacgaataagacgcgcgtcgggtttcaccagtttgatccacggcagccagacggttttggtcaggagcgccagtggggcaagcgtcgcctcaacgcgtggcagatgcaccatcgtgacttccggaatatctggcggattgccgagaatgacgtcttccgcgtgaacatgcggccacggtacccagcttcgccagccggtctcctgtttttggcgttcccacaccacgcctaaatcgccgcgaatagcgaaaggccggttcaattcggtagagactttctggttgatggtcggtttgaggcggttccagtcaaatgttgcgatcaacaaaatcactatggcgatcaacaacaagaaagtccctgtgatggcggcggttattttgcctgctttagtcatgtgttatttcctcacttcttcccttgcctgtcctaaagatagttcagccagacgaaaaaggaggatgaccgcgcctcgtaataccacgtattacgggaacagtctggcgttacagggtcagaatcacctcttcgagcgatatcagcggcacgggtcgagaaagaaaatagccctgggcggcaaaggcgggcgaacgctgcacatcacgccactcttccagcgtctccacgccctcgacaataacgccgcggcagtagcggttcatcagttgcagcagcagagtgaacaggttgcgtccctccggggactgacgcagcatgacgaacagctcgcgcgccactttaatgtagtcataacgcacttcgctcagcgctgaaaaattggccataccggtaccaaaatcatccagccacagcgggccgaactcacacatcgaggcgaaagaggagtctttcggcaaacgaatatgttccaccagttcgaaacgcagccagggtaagcgctccatcgctgccagaatgtccggctgtcgtcgcatggcaatcagcgtagggccgtcgacattgaccgatgccaataagtgatggcgagtgaaaaaatccgctttttgttcgagctgatgaagttgttctttcactacgtcaatgcggtgtcgaaccgctaactccgcgaaataacgatccggggcaatacgtctggaagggttatcaggatgggtgacgacagtgagaagttcaaccgccatcagacggccatccgtctggtatatcggctggtaagtataggcacgctcgcattgcagccaatagcgccgttcctgcaaattctctatacctgcatcaggaacgcgtagctgctggataacctgctttatcatctcagttgtcctgttaatgggagtgtgactgtccggactcgtcaaaggttatcggcgttcaggcagagaactttaccctcggtccctggcaaaataaaaacagcccccgaaacttgtcaaaaatacgcacttgctcaaaaaaataatggaccgatgttttaatattattgaccactaaacatccacagcgcacactaacgctaatttttacagatcaggttcacgactatgtctaaaaagattgccgtgattggcgaatgcatgattgagctgtcgcagaaaggcgctgatgttcagcgcggcttcggcggcgacacgctgaatacctccgtttatattgcccgtcaggtcgattctgccgctctggccgttcactatgtgacggcgctgggtaccgacagtttcagccaacagatgctggaggcgtggcagcatgaaaatgtggatacctcgctaacgcagcggatggaaaatcgcctgccaggcctctattacatcgaaaccgatgacactggcgagcgtaccttctactactggcgtaacgaagcggcagcgaaattctggctggagagcgagcagtcagcggctatctgcgagacgctggcgaccttcgattatctctacctgagcggcattagcctcgcgattttaagcccgaccagccgtgataagctgctgtctttattgcgtgaatgccgggccaacggcgggaaagtcatttttgataataactatcgcccgcgtttatggacaagtcgcgaagaaacgcagcaggtctatcaaaagatgctggaatgtactgatatcgccttcctgacactggacgatgaagacgcgctatggggtcagcaaccagtggaagaggtcattgcccgcacccatgcggcaggcgtgcaggaagtggtggtaaaacgcggggcggactcttgcctggtctcgattcagggcgaggcgctcattgacgttccggcagtgaaactgccgaaagagaaagtgatagacaccactgccgcaggcgactccttcagcgccggttatctggccgttcgtttgacgggcggcagcgcgacggatgccgcgaagcgcggacacctgacggccagcacggtgattcagtaccgtggggccattattccgcacgacgcgatgccgcagtaagtcattcgctcttgcccggtggcgctgcgcttaccgggccgacaggcggcagcttactgtgccgccggtgtctccgtcacttccggatgcgcctcatctgcttcaacagcggcggcagtagtcgggaccatgatttcatcccacgtcgcctttaacgccttcatattaaattccggctcgccttgcggttgcagcaaaattaatgccatctcctgcgatagctgctgacgtaaattctgattgagcatatcaacggtcaggctgttgaggaaattctggcgcagcttctgatactgctccggcgcgatatccaccacttgattctgcagcgagcgcatacgctgtccagtcaaaatgtcagtatcggtacgcgcgtaggtcgcgaacagcttttgcaattcgagatttttctgcgccaccagcgcagtaaactcctcttccgacaaacctttgtcgcgtactttcgccagttcattcgccaccaggctcaaattggtattgagcttatcattaggtgattcaatgttgatggcgcactgcgcgcgcagaaacagaacccggcagtcaaaccccagaccaatatctttcgcgttatttttagtaagctcttgctggatatgccagaacagcgcttcgcgcgccagatccgcctgccagtagcgcaacagcgccgccgactcgcgaatcggttgccacggcgtatcccacataatggagagacgatcctggcgcaccgcatcggtcataatgctcactgattccgcccgcagcggcgaaagcgtcggcaccggggcgggcgtttcgcgtttacctttcagcgtaccgaacgttttattgatctgctcggcgacggagcgcgcatcaatgttgccgacaacaatcagcgtcatggcatccggggtgtaccatttttcatagaaagcctgaattttggctgcgtctaccggctgctttaacggttccgcgggatcgtgccccaataacgccgaccctttcagccgataacgccaccagccctctttagtatctgctggccacgtcgcaaccatatcttcgctgcttaacgcatgattcaccgtctctggcgtaatggttaatttaccggagacgttagccagataggtcagcgcttctttcagcagatcgttacggttattgggtaaactgaggttatagagcgtggaatcataagaaacaataacgggcggcatgggacgtttcggatcaaacccttgctgccataaagaacgtgcctgtgcggcatccagaccaccgctttgcgtcagcgcgatacggggaatcgcatggctgaacccgctctgttgcgtactttcggtgagcgaaccggtattaacctggagacgaacttcaatacgatcgctggggcgctgaggcgtagccaacacttgccactgtaacccattagccagcgtcccctgttgccatgccggatcgggctggagcgcatctgcctgcacatagccggcagaggccaacatcaacagactgcccgctaagagtcgaatttttgtgccctgcatgtgaacccctgatcaacaatcctggtaataaaaagacagccccggcagggatgcctgaatatgacgtaaaaacacttcgtgttagaccgcgagaacctaaaaatgtcacggaagaagtgaaataatccctaagcatcatgctgtatgctttgggcgcaggggtcaattatgcgcaaacacccgcagtcctggaagggactacgggcataagtggcgagattaggaggaaatttcgtgcgttttgccatccggcgcacgattattaagcacatcgtccagcttttggtgatctaactctttcacccatttggcaaccaccaccgtcgccacgccgttacccaccaggttagtcagcgcgcgcgcttcggacataaagcggtcgataccgaggattaacgccagtcccgcaaccggtaaatggcctacggcggagatagtggccgccagcacaataaagccgcttccggtcacgcccgcggcgccttttgacgatagcagcagcacgaccagcagcgttatctggtggaagatatccatatggctgttggtcgcctgggcgataaacaccgccgccatcgtcaggtagatagaggtgccatcgaggttgaacgaataccccgtcgggatcaccagccctacaaccgacttacggcaccccagtttttccatcttatcgagcatacgcggcaacgctgactcggaagaggaggtgccgagcacaatgagtaattcttcccggatatagcgaataaatttaaaaatgctaaagcccgttacccgtgcaatcgtccccagcaccaccaccacgaagagaatacaggtgatatagaagcagataatgagctgccccagttgcaccagagaaccgacgccgtatttaccgatggtgaaggccatcgcgccgaatgcgccaatcggcgccaggcgcatgatcatattgatgatgccgaaaatgacctgcgaaaaactctcaatcacattgaaaatgagctggcctttgctgcccaaacggtgcagcgcaaaaccaaacaacaccgcaaacagtaagacctgcagaatgttgccgctggcaaacgcgccgatcacgctacccggtatgacatccatcaggaaggcaataatgccctgctccttggcttgtgcggcataaacggccaccgcctgcgcatccagcgttgccggatcgacgttcatcccggcgccaggctgcacaacgttgacgatgataagaccgataatcagcgcaatcgtactgacaatttcaaagtaaagcagcgcgaccgcgccggtacggcccaccgctttcatgctttccatgcctgcgatgcccgtcacgacagtacagaaaatgacaggagcgatgatcatcttaatgagcttaacgaacgcgtcgccaagcggtttcatttgtgcgcccagttcaggatagtaatggccaaggagaataccaatggcgattgctgtcaggacctgaaaataaagacttttgaacagagaggttttcatagggtgtccttgaagtaaaaaccacaggtcttgtaaggttatgagtaacctgcggccttaaaataacacccacacaacatgacagaaatgcgccaggatcataattgaaacaaaaatgttaaaaagtttgagctggctcgcacaagcgcgaccttttttaacttttgtaatcaggattttcgtgcgacagataccgttcttcaaagatatccgcgggaacgggccgagcaaacaggaagccttgcgcgacgttgactcccgcctgttccagccacgcgcgttgcgcctcgttctccacgccctcggcaatcaattgtaaattaagactgcgggccatcaggataatcgccgtcaccatactgtgatcatccggtaacccatcgacaaacattttatcaattttaaggatatcgaccggtagcgacttcatatgctgtaactggcgcagccccgcgtaacccatgccaaaatcatccagtgcgatacgcacgccagcattacgtaacggacgtaagatagcgacggcagcgtgtggatcgtcgatacggcggctttcagtgacctcaagaatcagcgtacccggttgaatacgatagcggtttaacaattccagcagatccgacaccatgccagggtgcatgagctgtaacgcggaaagattgacggagagcggcaatgtcacgccgcgctcctgccaggcggcaagctggcgacaggactcttccagcacccaatagcccaccgtgaccatcaggccgcaggattcaatgcgctcaatcagcccctccggtaattcccagctaccgtccggctgctgcatacgtaacaaggcttcggcgcttaatacgttgccgctgcgcatttcgacctgcggctgcagccaaatggcaaactgatggttatccagcgcggtaaggatatcgctctcttcggtaaggcgctgttgagcggcctccatctgcgccgggtcaaagaactggatctgatttttaccttttcggcgcgcggtaaacgcggcggagacggcgcgaccatagagcgcttcggcggtcagatcgccataatacatcgcaatgccaatactgcagcttgggcgcagttgaataccctggatgggcagtcgttcattaatgatagtgagtatttgctgacctaatgtgatggcgtgccacggctctttaacgccgtgggcgataatggcaaagtcatacccgctgacctgcgtaagcaccatgcgcggcgccagcaccgacttcagcttctcaaccagcgtcagtaatagaatctcccgctgcgtttcttgcagcacgcctgccgtgtcacgcaacgtttcgcacgtcacgatgataagcgcggtggtctgttggcgggtgataacctgttccagcaatgccattaaaaaggctttattgggcagctcggaaaccggaaaacgcatcgcgttgtccgtttgctcctcgcgttgacgctgcataagctgctggttgaggttatagctgcgcaccagcatcccaatttcatcatcctgatgcagacgcggcaacgccagctgatgtccgatcagctcctgctgcggaatgtcgttcagctcgcgggcgattttgcgcagcggatgcacaatcaggcggtttacgcaccaggcgatggccaccgtcaggatcagcgataaaagtaagtaaatggtcactaacgtagagagcgcgctcatgacgaacttgtacatacggtacgaatccgcctgcaatacaaggtaggccagcggttgcggattggcaggacgctccaacgaataaaccggcaaagaaatttgtaccggcagttcgaagagacgcgtcaccataaccgggacggggcgttcaggaatgaagcgcttacgcaacgcctggaactgattcggcaataccacatcggcgcgactcaccacgcccgcaggtttaatactttccagaatggtttccgcgccggggagatccgcttttaaaatcgcggaagaaagaggttcccgaacagatcgcgcgatgctttccagttgcgtagccgtgttgtagcggttctgctgtaccagatggaacaacaaaacggtgcaaaagacaaaaacaaacatcatgacaacggccgcaaccattgccatctgtttaattgttaacgagcggctgacgcgcaaattgactctccctggatatcccggactgccgcctgagtatacccgattgcagcggcattaagagaggctgtatctgaaaaggacttttctgaataacggttaatgatagcgtctgatggcgctgcgcttctcaggcctacgacgcctgtcaattcgtaggcctgacgcaatgattaccagtcagcgtaaggcaccagaggctgcggcggtaaatccatatccccctgccagcccgccgcggaataacgaacatacagcagcagatgactgggggtatagtctttcgcctgctgaatatcgacagccgtacccacaaaccagttggcagtgacccggcgttcaatgagcgcccgcgcggtatagccaaatccctggctgctgccgccgccgttggtctggtcacgcgcatcctcctgataatctgccgggatcaaattcatcagcggataacgcggcatggtacggttgcgggagtgcgaccaggataccgagccgcctaactcccacgaccagttttccgtacgctgccgccacatcaccggcaccgcaaacgacaggtattcctgcgggctataataaccgccctgacccagtgaataaccgctcagatctttgtcgtaatgccagatcatgttattcagcccgacggtaacacggcggttattctcgttaatcaccttatagtaataaccggtcatccagcgcacgcgccagttatcttctacatttttaccgctcaactggtcgccgctgagcgacgcccagacaccgtttgcttcgcctttatcatagctgagactgacgccgccgccgttggcccgcacgccgccccatttggtgccggtattgctgctggcatccttttgcccgccaaacgccagcagcgagctggagatcgggcgacgatgcgcgttcagggtataacccaacggcccgatatcgtcgctatagctgacgccgccaaccacatcaacgacattaaagcccatcggcgtcgtgccgatatcccagcgccaggtctcattctgccagccgaccgccacgctcgcgcccgtatcggcctggctacgatgtccgctgcatttctccagcgtacaggtaccccagttattatcgtattttccatccgcatccgtagagaagcggccaacatccatattcaccatatcagtacgaaagaacgcccgtccgtccgaccagggcgcatccacctgaagcatcgtggtatgcgccttcagatcggagtaaccgccagtcccgctcgacccccaataatcgtgcgccaacgtgacattgagatcctgctgacggtacaactccgccgcatcgctacgcacgccgcgttttagccagtcgtctttttcatcattgcgcgtcaggcgggtaaaggtatcgttatcctggggacgaaccggcgtaatcgccgcggcgaccattgcgtctttgtaggtctccagcgcccgctgcggctcgcccgtttgcgcctgaaaagcggcggcgtcacgcaataccatcgcgctttccattgatggcggctgtgcttttgcctgcggcgtaatgcggttgaaggtccgcgccgccgccgtgatatcgccaagctggagctgcgccagcgcgacgcggcgctgcatgttaatagaggtgatttgcgacgcaggcagcgccgccagctgagcgcgcgccgcagcgttatcgccctgtgcgatgtcgatttccacccgccccagcatggcatcgacattacccggttcccgcgccagaacggcgtcataagcggcgcgggccgccgcattatcgccacgctgctgcgcccagtccgccaacgttaacgcaatgcgcgtagagggcggctgctgacgtaacaacgcttccgcttcgcgttctttgccgctatcgcgcaagcggttagcgctttccagcacctggttactttgcaatcggcccgccagttcctgaatattgctgttccactggctggtcggcagggtattgagatgcgccagcgccgcccggtcccgatcgctgccggaaagataaagcccataagcatagacctgttccggatcgtttggcttctgctgcgccagagagcgcatttgcgcatcggcctgagcgtgctgcccggcctgccacagatcgcgtgacagtcggtacgtcacccacacgctccccggatctaatgccagccgacgacggtgcagttctgcggcctgcgcccatttgccctcgctttccagcgtttccgcctgctgcgcaagacggtcattttccagactgcgttcgatatcgtcgatactgcgccgctggctggcggaaagagaagcgataaacgcggcggctttttgcggcgactgctggcgataaagattcgccagcccgcgtacagcattggtattaccgctatccatacgcagcgtctgctgataataacgttcggcggcggcattatctttgcgcgccatcgccacatcccccagccccagtaccgcgtagctgtcggtgttatccactgctcgcgcctgctgatagaaacgctccgcctgggccagattattcgcttttaaggccgcgtcgccctgctgaattaacagccagtagcgattgaccttcagcagactctcccacttatcgcggctgctgctgtgcggcgccatcgccagcgccttttcaaactgcgcgacggcgcgggcgcgatcgccacgctgtgagtatgcctgccccagcgcgccgaccgcctcgctgtcgtcctgccgggcgctcaccgcctgctgcaattgcgcaatggccttaccgccttctccggcattaaccgccgcgatgccctgcgagcgcgcacggaacgccggatcggctaactgtttttgctgctcgctaagctgggcgcgggcggcagacacgctatcgccttcgctaaactgcgtcagatagtcttgcaacgcttttacgctggcgtcgctaaccgggagatcttttatctgctggtaccagatggcggaggccgcgctgcgtcccgtactggatttcgccatctgtttaagcaccgcgaatccctcatcgcgccgcccgctggcgaacaacagttgcgccagcgcattttgcagagcgttattacccggactgacggcattgattttctgtagctggttaatcgcttcgtgacggcgggcgggcaatttcgccacggtcgtccagtattcgaccgccagttcgccctccggcggataacctttaaacagcttgtcgtagctggcgatcgcttgttcagtatggccggtcgtcgccagtaaacgcgcctcctgcaaagactggcgtccttgcggcgtggagagcagcatcgcggtgcgggaagattgatacgccgtcgactccggcgccagttgcgccagccggtcaagtagcttctgtgccccgtcgctatccccctggcgcaacagatagcggaaacgggcggcgataacctgtggatcattggggtcgatcagctccaggcgatagagcgactgacggactaagtcctcacggtgcgtggcctcgcccagccgaacctgctccagcaactgttgctgcgcggaggtcgctgcgccggcaagcggtgttagcgccataccaagcgataaacccaacaatgcccgagaaacgccccttttgccaggtaaggcgtttcgaccgccagccggcaaaaaagcgtgcatgagacttaacgtgaacttacgcattcctggccccagtcaggtaataattcacctttgacggtgaagcgaaaacggtgctgatcccagccttgtccaaagagagtcagcacatagttgtaataggcatcgctgccaggaaaatggtctgcgacccgctgtcgctgcacggcctgggcgtcgcgattttgcaggaaaggcagtaaggcggcggaaaacccgaccggccccgtcccttgcgcattcccgctgacgacatccactttctccggtggaacgccgtttttcatcgttaacgtcgccatcggtttaaatcgcgccagtaaacgcgctttttgcggatcgccatcatgcatcattcccgcccataaatagacgcgaatcgcatcgtagctactgatcagcgtcttttccgctttcaactgccagccttgcttgctttcataacgcacccagtccggcgagaaacctttcggcgcggtttccagcaaaagccgcaaattggtttcccgtaacgtcgaccacggcgcgccaaaacggctaaagtattgcgccaactgcggcggcagatagcttgggttaaaacgccagctattcgcctcggcaaagccgattttgccaggtagcagcattgagcccagccccggcacattcaggacctcttcgcgggcgatgcgttttagcaacgccgtgcccacctcggtataacgcgtctctttccacagacgaccggcctccagcagcgaccatgccatccagatatcgccgtcggacgcggagttgctgtccagcaccgaccaggtgtcgggatctttttgcccccacagccaggcgggcagatattcacgcaacgatccctgcgccagattgttttgcgtccagttaaacagttgcgcgaacgccggtcgatcgttcgctgccagggcaaagaacatggcgtagctttgcccttcggaggtggtaatttttcgcgcatcgcccggatcgataacgcgtccctgctggctaatgtaatctttcttgaactgttcccacgcaggccagctacaggctgcctgcgcatttattgccgtcagcatgacgagcatcgttatccatccgcgcagcatagtcatcatgcgttactcatggtcagggtcgagacgacggcgactgagaatacgtagcagacgccacaatacccacgccagtaataccacactgagggccgccagtaccgccagcagcaccgggtgattcgccagcgcataccacagccgctcaaaccacggcagatgtccgacgtaatagatatcgccaacgcgcagactgtgaacgccggactcgcggatcaccgccacggaaccaaacatcgcggcgcgtttaccgctgtcgttcacggcgtcgttcagtagctggtaaccgcgcgggctgtcagccagcagagcaatcacgctgcgctgatcgttaaacggcgactggaagcccaccaccgccgccatcgggccgctggcggtgacggtggactgcgcatccgccgcgcgatcggcctcatccggcataatcgacgggaaagcggtctgccgcatcggggtttttacccagctttgtgtcgcctgcaccaacagatcgatacgcttatcgtcttttagcttgcccggaatagcgctaataatcagcagatcggcgtctttgtcggctatctgagcgctatcatcggtgattgtcagattaattgccgggaaaccggtctgtccgccaatggcgccgaccgtattcagcagcgtttccatttgcgcttcggttggggtcttcggcatcaccgccagcgtgtcagacaggtcggccatccggctgaacgggaaacccgcattggcgaacgcgcgtaaatccggcatcgcgataaagtggtaatatttcgaaaaatcgatagtggagtcatcccctatcaccacatgattcggtaccggctggaaggtaatacagttgtccaccgacccgcccggcatcggattcatatagcggaagtcaaaacgtagttggttcatcgcccccagtttgagcgccggaatagacacatccgttttaccatccagcagtccctgaagtaccggcaggcgcaacaggagtcgattagtttcctgcgtgctgttaaggctaaaggcttgcaggaactggttattcagactgatatccagccgtgaactgtctttggtcggcggcgaggtataacggtagttgagatccatatcaataccgttgctacgcagcaaatagaggtccggcggcagattcaaagaaacgttgatgggcgccggctccagcccactcgactggagctgctcttcataggttttcagctcgccaaaagtgaccgggcgatcggtacgcacccagttcggcgcatcatacggtttgcgcgccagcagcggttttacatcgttgaccaccacgctggaaccacggaagagaatattcccttgtgcgataccttttgccgcctgcaacaggtctttatcatctcgaccaaacacaaccagcaacttcacatacggattatccggatggctcatcatctcgataaccggcgcgttaaccgcaggatgatcgcgcaggaaatcggggcgtcgatcgttggtggcgaacacgatcgcattgcgatccggcaggtgattatacaacaccgggaagcgctgaccgcgccagcccgcccgcgatccaaaccaggacgcgacaatagaagccgcctgctgctgcgccagatccggcatatcagcaaacactatcggcaacgtcactggacggttatcccgcggatcgaaaaacggcaccgggaagtgggacagatcgttattcaccgccagcatgttataggtcagatccagggcgctatttcgcccgatgtctaaccacagagtactgctggccgggttttcacacacgtcgcgatagtggccgacaaactccagccgcacccggttaaagtcggtgataaatagcggattgataggtacctgcgccagcgtctttttccccaactgctcttttgtcaccggcagtacgcccatcagttcatcattgagataaaccttgagctgcgactgaaccggcaggagcgacggcgagggcgtatattccagattcagcaccgctttcgacgccacttcatcgctgcgcataccaaattcaatgccgccgttagggttaacgccacgcagcgccatactacccggcggcggcgcgatttgcgcaaaggtcagcttgacctcgcgcgaaggcgcggtctgcgccacgacgggcgcctcagttgcgggcgacggcgcaggctcggtgggttcagcatttatcaatggcggcgtagcaggcgccgccgccgtcatgaaagcaggaaacgcgcttaatcctattaccgccgcacacatccaggacaattttcttttcatcgcattatcatcattgttgagcctgagccataacccgatccgacggctgtatcgccgcttgccgctccgggcgacgcggaataaacgatacaatccaggcaattaacgccgtcaacgatcggaaaattacttttactgaaggcggcgcgaattccgcgaggtggcgatatccgcggaagcccagcttcagaatatccagcaagctttccagcggtttatcttccgggaagctatcttgccaaagcgcccacgtatcggcgcgcgcgaaggtacactgcacaaaatcaatatgttgtttggtggtgagcggcatcagttgtagcccgacctcattgcccgttacgcgcaccacctgcgttggaaagacatattcctgctgcccgcgtttaagcaacagattcactttctgcccttccagcacctgcgcctgaccgttgatcttgatgcctaacccgccgtcggagaagtcatgtacggtacaggagaacaaatgtccatcttcgcgggcgatggcccccggcatggcaatctcgacccgatgcgcgcgcctgacctgtttactctctaccgaaaccgcaaccgcgccgccgagaatgaccaggttatagaagacccacaccaggctaacgatgacggtcagcgtttcattttccggcccgtaatagtatcgccatacgcccgccgccacgccgagcaggttaagcaagacaaggaagatatacggacgcgagattacccagtcgacgtacttctcttccaccagcccgcctttcgccgtgacgttaaatttccctttgtgcggattgatcaacgcgaccagagtcggcggtgcgatataccatgccagtaccgtttcatagatttcactccagaaagagtgacgatacttgccctgaatcttcgagttagtcaggctggcgtggaccatgtgcggtatcacaaatagcgcaatcatcaacgcaggcgcataaatgatataggcgtgcagcagcagaaaagccagcggcgcggtcagaaagatcaggcgcggaatgccggacaagaaatggaacatcgcgttgaggtagcacagccgctgcgccagttttaagcctttaccaaacagagggttatcgaggcggaaaatttgcaccataccccgcgcccaacgaatacgctgcccgatatgcgccgacaggctttccgtcgccagccccgccgcctgcggaatgcgcatatacgctgaggtataacctcgccggtgcagccggagcgaagtatgcgcatcttccgtcaccgtctcaacggcgataccgccaatctcatccagcggcttacggcgaatcaccgcgcacgatccgcaaaagaaagtggcgtcccacatatcgttaccgtcctgcaccagtccgtaaaacagcgtgccttcgttaggcgttttacgaaaacgtcccaggttgcgctcaaacgggtccggggagaagaaatgatgcggcgtctgcatcatcgccagctgtttttctttcaggaaccagcccattgtcatttgcagaaacgagcgtgtcggcacatggtcgcaatcgaagatcgccacaaactcgcctttcgcgtgttttagcgcattgttgatgttgccggctttggcgtgttcatgcgtggtgcgggcaatgtaatgcacgccaacatgtcgggcaaaatgacgaaatgattcacgcccgccgtcatcaaggatccagatattcagcttgtccttcggccagtcaatgccaagcgaagcgtaaatggtatttttgaccacattaaggtcttcgttataggtcggtacaaaaatatccaccgtcggccactgcgacatttctttcggcaacggcaccggttgacgatttaacggccacaccacctggaagtaccccagcaccagcacaatccaggcgtaggtttccgcaaacagcagaatcagcccgcacaccagactgaccgggtcgtcccaatttagcgtcgaggtatagcgccaccagatataacgacaggagaccgttaacgacagcacgatgagcatcagcgcggaaaagcgtcccggcatacgtcgtaccaacagcgcaacgccccacagcaacagcagaaagataaattgcgatagcgggttaaatggctgcgtaatacagatcagcgccagtatcagtgaaaaggtcacgataacgcccagaataaaacgccgggcgccgttgctaagatgtcccagctctttttccttttccaggtgcgttgtcttttggcgcacccgttccggtaaggtatccatccattgatggtaacgtccacgaacgtccttcaggcgcgcaaatgaccgccagcgcggttcatgacgttctttagtcgacgagatcatcaccagccagagggtctgaatgaggtaacgggccgggtccagcgggcgcgggcgtgcggcgttaatatgcggataaagcgctttatgcccgtcgcgaatacgctgccagcgcggatgctcaagcggaaacactatccacgccagaatcgtccacaggcagccgagcgctgcgctaaacggcgacgcgccgtggcggcggtaaccctgatagcgctcgctcaaacgcgcgctaaccggcgggataagcagccaccgggaaagggcgctcatcgcaggctcccggcggacgttttgtcgcccgcatcatgcagcaggcaccagttcgccagcgttaacacctcttcggcggctaacgaatcgctgcgatattcgcctaacggctgtttcgacgccatgcactccgccatcgcctcatcgcgatggatcacaatgggcagcaaccggcgctggctttgcagccagacctggtacagatcgtcctgtaactgactgccaatgcgtaagtcattgatcagaatatgcgctccggcaggcaacgcctgctgatgaaggcgaatatggcagttagcgtcaacccgggctatcgccagcgtatggtcgcagaggctcaccagttgccgtgtcagcggtgacgcgccgtagggcaagtccagtaaaatccagctataacgcccgctcgctttcagcgcctggatagccgatccgatctctcccagcgtctcctgccaggactgcggattttcccgctcttgcgcggtgagctgtccaaacggcagtagatcaagctgtgaggtataacgtaatccggcatcgcgccagtcctggccgtccagcaacgatcgcgcccaaccgccctgatggacgaagtcgacgttaaacgacatgcgcagcaggttatcggggctggcgtcaatcaccaggacattttcccctaagatttgtaacgcccaggcgagtgctgcggtgagagatgtggttcccaccccgccgcgcacgccctgcagtcccagaatcgccattcatggcttccttaatgaatgtggttgcgcaaattcagccaggagcggccatcttttaatcgccgccgccaactgttcgcgttgggaaatatcggtataatctatttcgggtagtgaaaacgcctggcttaatgccagaaaatcattttgaaaagtgtagcccaacgttggatcggactgagcgccaggttcattgttatacattctggttgctcctttttaaatatttctcactggcagcattacgccccgtcgtcaatacgggagaacgcgcatttttcatctttccgtgacatcatttataatgtgtaaaaatgcaaagcgcagagttacagggcatcctgccgggcaaattgattcacatgctaaatctgatgcgttttaatttcaatgttaggtttatttctgtgctttcgctagtaaactgataaacagttaaaatagtgacatgagggacactgtggaccccgtattttctctcggcatctcatcattatgggatgaactgcgccatatgccaaccggcggcgtctggtgggttaacgccgatcgccagcaagatgccatcagtctggtgaatcaaacgattgcgtcacaaacggagaatgcaaatgtcgccgtcatcggcatggaaggcgatcctggcaaagtaatcaaattagatgaatctcacggtccggagaaaatccgcttatttaccatgccggattcagaaaaagggctatactctttgccccacgatttgctttgttctgttaacccgacgcattactttttcattcttatttgtgcaaataacacgtggcggaatataacgtcagaaagcctgcataaatggctggaaaaaatgaataaatggactcgttttcatcactgttcattgttggttattaacccttgtaataatagcgataaacagtcctcgttgttgatgggcgagtatcgctcactttttggcctcgccagtttacgttttcagggcgaccaacatttgttcgatattgccttctggtgtaacgaaaaaggcgtcagcgcccgacagcagttattgctgtgtcagcaggacgaacgctggacgctatcccatcaggaggagacggcaattcagccgcgtagcgacgaaaaacgcattcttagccacgtcgccgtccttgaaggcgcgccgccgctctcggaacactggacgcttttcgacaataacgaagcgctattcaacgacgcgcgcacggcgcaggccgcgacaattattttttcgcttacacagaacaaccaaatcgagccgcttgctcgtcgcattcatactttgcggcgccagcggggaagcgcgctgaaaattgtcgtgcgcgaaaatatcgccagtttgcgcgccaccgatgagcgcctgctgctgggctgcggcgcgaatatgatcattccctggaacgccccgctttcacgctgcctgacgcttattgaaagcgtgcaggggcagcagttcagccgttacgtaccggaagacatcaccacgctactgtcgatgacgcagccgttgaaactgcgcggttttcagccgtgggataccttctgcgatgccatccatacgatgatgagcaacaccctgctccccgccgacgggaaaggcgttctggtcgcgctgcgcccggtgccgggcattcgggttgagcaggcgttaacattatgtcggccaaaccgaaccggcgatattatgaccatcggcggcaaccgtctggtgctgtttttatcattctgccgggtcaacgatctggataccgcgttaaaccatattttccctttgccgacgggcgatattttctctaatcgtatggtctggttcgaagataaacaaatcagcgccgagctggtgcagatgcgcttattgtcgccggaactgtggggaacgccgctaccgctggcaaaacgcgccgacccggtaataaatgccgaacacgatggccgcatctggcgtcgtattcctgaacccctgcgattgctcgacgacaccgcggagcgtgcatcatgatgaccatcagcgatatcgtgcaaattattcttttttgcgcgctgattttctttccgctggggtatctggcgcgccattcgctacgccgtatcagtgatacgacccggctgctatttgccaaacctcgttatgtaaaaccagccggaactctgcgccgcgctacgaaagtcaaggcagacaaaaaatgactcagcatactcaaactccttcaatgccttctccgctctggcaatactggcgcggtctttccggctggaacttctattttctggtcaagtttggcctgctgtgggcaggctatctgaattttcatcctttactgaatttggtattcatggcgtttctgctcatgccaataccaaagtatcgccttcaccggttgcgccactggattgccattcccgtcggcttcgcgctgttctggcatgatacctggctgcccggcccgcaaagcattatgagccaggggacgcaggtggcggaattcagctccggttatctgctcgatctgatcgcccgttttattaactggcaaatgatcggcgccatcttcgtactgctggttgcctggctatttttatcacagtggattcgggtcacggtgtttgtggtcgccatcatggtatggctgaatgtactgacattaaccggcccggtttttacgctgtggccggcaggccagccaaccgatacggtgacgacaactggcggtaacgcggccgctaccgtcgcgacagcgggcgataagccggtcatcggcgatatgcctgcgcaaaccgcgccgccgacgaccgcgaatctgaacgcctggttgaacaccttctatgccgcggaagaaaagcggaaaacgacgttcccggcgcaacttccgcctgatgcgcagccgttcgacctattggtcatcaatatctgttcgctctcctggtcggatgtcgaagcggcaggcctgatgtcacatccgctatggtcgcactttgacattttgtttaaacactttaattccggtacgtcttacagcggcccggcggccattcgtctgctgcgcgccagctgtggtcaaccttcgcatacccgactttatcaaccagccaataacgaatgttatctgtttgataatctggcgaaactgggctttactcagcatctgatgatggatcataacggtgaatttggcggcttcctgaaagaagttcgcgaaaacggcggtatgcagagcgaactgatgaaccagtccggcctgccaaccgccctgctgtcattcgacggctcgccggtatatgacgatctggcggtcctgaaccgctggttgacaggggaagaacgtgaagccaattcccgctccgcgactttctttaacctgctgccgctgcacgatggcaaccacttccccggcgtcagcaaaacggcggattataaaatccgcgcgcagaaactgttcgatgaactggacgccttctttaccgaactggagaaatccgggcgtaaggtgatggtagtcgtcgtaccggagcacggcggcgcgctgaagggcgacagaatgcagatctcaggcctgcgcgatattcccagcccctccatcaccaacgtcccggcgggcgtgaaattttttggcatgaaagccccgcatgagggcgcgccgattgatattaatcagccgagcagctacctggcgatttccgaactggtcgtacgcgccgtggacggtaagctctttaccgaagacagtgtgaactggaacaagctgaccagcaatctgccgcaaaccgcgccggtttcagaaaacgctaatgcggtggtgattcagtaccagggtaagccctacgttcgtctgaatggcggcgactgggtgccttacccgcagtaaaccgaaaaaggccgcaaggtttcccctgcggcctggttcgggcgcatgttgccattacggcggacagacgctcaaaacgcgttacttcctgtcacgtagccagttgacgatcacactggcgataatgccagcaatgatcggcgctgccagatcgtgccagaagaccacgcccaactgcgtaagcgtcatatagccgccttgttgcaatggcaaccgttcgcggctatccttaaagtgtttgggttcaagttagcccccgtcaggttgccaggtttataccagtcaacgtgcgggggttttctctatccagcaacctatgccgccggggatcaaacccccgcaacattgcgcctcaccgggtaaacccggcttgctgctgatattacggcaaaatccccgtcccggcacggcgctaacgtgcaatctgcgtgacgcttcgcagacgattacttttatttgccagaatacattcagcatttctgaggctggcagtcagccgctcaattctgtaaattatgcctcctcgcggccagtcccggtgataccgaaaccctcgttcagcatcctgcgtctatgacatattcgcctgttgcgccagaggaatggctaaaagcaggtattaccgacgaacttatccgtctttcagcgggacctgaagatcccgacgatattattcatgaccttgaacgcgccagcagaaaagcagcattctgacgattgctcggcgaaccgctgtcaccggtttgccgcatcgggtatcaaggcactatagcctggttataggcagcattctttatgagagagctgcgtatattttgggcagggggctctatgcaggacgacacattaccattaaataacagtaacgctacgaccacaccgctttcaacgagattaccgtttacaaaatatgattttggctgggtgctcttgtgtatcggaatggcgatcggcgccggtaccgtcttaatgccagtgcaaatcggtctcaaggggatctgggtatttattaccgcttttatcatcgcctatcccgctacctatattgtgcaggatatttatctaaaaacgttatctgaaagcgaaacctgtgacgattatacggatattatcagtcactatcttggcaaaaactggggcatttttctcggtgtaatctattttcttatgattatccacggggtgtttatttattccctgtcggtggtgtttgatagcgcctcctatatcaaaaccttcggccttactgaggccgatctttcgcagtctattatctataaagtcgcgattttcgccgtgctggtggcgattgcctccggcggggaaaagttattatttaaaatttccggcccgatggtggtggtaaaagtcgggatcattctgatattcggtttcgcgatgatcccacactggaatcttgataatatttccgcctttcccgccgcatcggttttctttcgcgacgtactgctcactatcccattttgcttcttttctgcggtcttcattcaggtgctaaacccaatgaacatcgcctatcgtaagcgcgaacctgaccgtgtgctggccacccggatggcgattcgcacgcatcgcattagctatattacgctgattgccattattctctttttctcgttctcgtttaccttttcgattagtcatgaagaggcggtatcagcattcgagcagaatatttccgcccttgcgctggcagctcaggtaatccctggccatatcatccacattacctctaccatcctcaatatttttgccgtacttaccgcgttctttggtatttatttaggttttcacgaagcgcttaaaggtattgtactgaatgtattgagtcgtattatggatgtcaaaaacgtcaacccactgttactgacatctggaatctgtgtctttatcgtggttactctggttatttgggtttcgtttcgcgtctcagtattggtctttttccagttaggcagtccgctttatggcattgtcgcgtgtattattccctttttcctgatttataaagtagcgcaactggaaaaattacgcggcctgaaaacctggcttattctgttatatggaatattgttgtgcctgtcgccgttattaaaattgattgaataagtcgtaccggagagccatgcccggtggcgctacgcttaccaggcctacaggtacggtgtaggcttgataaggcgcagccgccatccggcataaaacgcaattaactcagcggtttctgcggattttcatcctgatcgacggcaaagcaggccaccaactggccgtcgtactctttaagctgcggctgtaactgcgtacagggtccgaagcgacggctgcagcgggcgttgaaggcgcagcccggcggcgggttcagcgggctcggcaactcgccggtcagcttaatccgctcacggcgatcgtccggattcagccgtggcgtggcggagagcaacgcctgggtatagggatgacgtggattgttaaaaatctgctctttggtccctttctccacgcagcggcctaagtacatgaccatcacttcatcggcgatgtgttccaccaccgacaggtcgtgcgagataaagacataagacagccccatatcctgttgcaaatccatcatcaggttcagcacctgggcgcgcaccgacacgtcgagcgcggagaccggttcgtcggcaatcactacgtccggatcaagcatcagaccgcgggcgatagcgatacgctgacgctggccgccggagaacatatgcggatagcggtcgtagtgctcggttttcagccccaccttcgccatcatcgccagcgctttttcacgacgctgcgctttactcaggctggtattgatcagcaacggctcttccagaatttgccccactttcttgcgtggattcagggaaccgtaggggttctgaaacacaatctgaattttctgccgccgcagtttctgcgcgtgcggatcgtgtttaagcagatcctgcccctggtaataaagctcgccgccggttggcgtttcaatcatcgtcagcaggcgacccagtgtggattttccacaaccggactcccccactacggccagcgttttaccgcgttcgagattaaacgacacgccgtccagcgcttttaccagccgttccggagaaaagatccccttcttcaccggatagtgttttttcaggtcgatagcccgcaacagcggctgttgcaaggtggcctcatgcgtactcatagtgtgggcctcccggcatcatcgagtgggtaatgacattttgactgacgtccatcgtccagttggttgagagcaggttcttccgcacgacatctgtccgtggcgtaggggcagcgcgggttaagcagacagcccgtcggtcggtcatatttccccggcaccacgcccggcagcgacgccaggcgcgctttgtcctgagcaaactctggtaacgcgcgtagcagtgcctgggtgtagggatgacgcggcgcgcggaaaatatcctgcgcagcgccggtttcgacgacctgcccggcgtacatgacgataattttgtgcgccgcttccgccaccagcgccaggtcatgggtaatcagcaccagcgccatgttctctttttgctgcaactccagcagcagctcaatgatttgcgcctgaatggtcacatccagcgccgtggtcggttcatcggcaattaacagctttggtcgacaggctatggccatcgcaatcatcacacgctgactcatgccgccagaaagctggtgcggatagacatccagacgagaagccggatcgggaatacccacctggttcaacaggtcaatcgctcgctgacgacgggttttcttgttcccgccctgatgtaccttgatggcttccataatctgaaagccaacggtatagcaaggattgaggctggtcatcgggtcctggaaaatcatcgccacttcagcgcccaccaggttgcgacgttccttctcggaaatgcgcttcagatcctgtccgttaaagagcaggttttccgccatcacgcggcctgggtaatcgataagccccataattgccagcgagctgacggatttgccggaaccagactcgccgacaatcccgaccacctcaccctgcttcacgctgtagctaatgcggtcgacggctttgaacggtgtcccttcgtcgccgaagtgcaccgataattgatctacatttaataacgccatctcgaacctcttactgcttcagtttgggatcgagcgcgtcacgcagaccgtcacccatcaggttaaatgccagtaccgtcagcagaatcgccagccccgggaaggtcacgacccaccaggcgctttgcgcgaactgcagaacgtcagagagcatggtgccccattccggcgtaggcggctgtgcgcccatgccaagaaagccgagggcagccatatcgagaatggcgttagagaagcccagtgacgcctgaacgatcagcggcgcaaggcagttcgggaaaatattgacgaacatctgacgcatcgcgcctgcgcccgccacgcgggaggcagtcacataatcgcggttcacctctaccagaaccgccgcgcgggttaagcggacatagtgcggcagcgccacaaacgtcaacgccagcgcagcgttgccgatggaggggccgaagatcgccaccagcaccagcgccagcagcaggctcggcagggccagcataatatcgaccacgcgcatgatgatgttatcgaccagaccgccgaagtagcccgcgaccaggccgagaataatccccattaccagcgacaggacgaccaccagacagccgaccagcagtgacaaacgcgcgccatacatcaggcgcgagaggacatcgcgaccaacatcatccgttcccagaatatgcgcccaactgccgccttcctgccagaccggcggcgccagcagcgcatcgcggaactgctctgccgggttgtacggcgcaataaagttggcaaacaccgcaatcaggatcacgatgagaacatacgccagcccgacgaccgcgcctttattgcgtttgaaatagtgccagaactcccgcaatggcgtcatgggcgccggtgcggcattaacattattttcagtaacctgtgacatgatggccccttacttcttatgccgaatacgcgggttcaccacgccgtacagcaggtctaccagcaggttgacgagaataatcatcgtcgctaccagtaacacgccgccctgcactaccggataatcgcggcgttgcagcgcatcgatcagccagcgccccagaccgggccacgagaagatagtttctgtcagaatcgcgcctgccagcagcgtcccgacctgcaggccgatcacggtgacgactggcagcatggcgttacgcagagcatggacgataatgacgcgcatcctggtcaaccctttggcgcgtgcggtacggatgtaatcctcccccagcacttccagcatcgacgaacgggtcatacgcacaatgacggccagcgggattgtgccgagcaccatcgcaggcaggatcatatgcgccagcgcatcaataaagttaccctcttcgccccagatagcggtgtcgatcagcataaagcccgtcaacggattggtatcatcaaggaacaccatatcgctcacgcgcccggaaaccggcgtcaggttccagtggacggagaccagcatgatcagcatcatgccccaccagaagataggcatagagtaaccggtcagcgccaggccaacggcagtgtgatcgaagatagaaccgcgcttcactgcggccagcacgcccaccggaatccccacggcgacggcaaaaatcatggcgcagacgccaagttccagcgtcgctttaaagcgaggcacaaactcgtcccatacagggattcggcttttcagcgagatgcctaaatcgccatgcatcaccccccagatataatggaggtactgctgccacatcggtttatcaagaccgagttcagccagcagttgagcatgacgctcaggggaaatacctcgctcacccgccatgatcatcaccggatcgccggggatcatgtggacaaaggcaaaggtgagaagggtaataccgataaacgtcgggataacgagtcccaaacgtcggagaatgaactgcaacataacccgaattctctctcatgacccacggcctggaaccgtgagtctgtattgctcacaaatcttatcccacgcaaactgcatcgcggataaagcattacgccggatggcgctgcgcttatccggcctacacaacaccggggcgcagcgctcttttaattattcgacagagacgttttcgaagtgatgtttgcctaatggatcaaccacatagcctttaacttctttacgcactggctcataaaccgtggagtgagcgatgatcagcgctggcgcctggtcatgcatcacaacctgggcctgtttatagagctcaatacgcttgttgtggtcatcggtcgcacgcgcaggctgaatcaggtcttcaaacggcttataacaccattttgaatagttggagccttgctgggcggcatcgcagctgaacagcgtggcgaagaagttatccggatcgccattatcgccggtccagcccatcatcaccgtctggtgctcgccatctttagcgcgcttgaggtattcgccccattcataggtgacaattttggcctgaacgccaatcttcgcccaatccgcctggatcatttccgccatacgacgcgcattcgggttatagggacgctgtaccggcatcgcccacagatcgatggtgaagcctttttccagaccggcttctttcagcagcgccttcgctttttccggatcgtagccatagtctttaatatcgtcgttgtagccccacattgtcggcgggatcaggtttttcgccgcaacgcccgcgccctgataaacggctttgatgatggcctctttattcacggcataggtcaacgcctggcgaactttgacatcatccagcggttttttctgcacgttataggagagataacccacgttcagaccggcctgctccatcaggttgatgtttttatcttctttcatgcgcgcaatatccgccgggttcggatacggcatcacctgacattcgttcttctgcagtttggcgtaacgcacagaggcgtcaggcgtgatggagaagaccagacggtcaatctgcggcttcgtgccccagtagccgtcaaaggctttgtagagaatgcgggagtctttctgatattgcaccagttggaacgggccagtgccgaccgggttcagatccactttttccggcgtaccggctttcagcatgttgtcagcatattctttggaaagaatagaggcaaagtccatggctaaatcggcaaggaacggcgcttccggacgcgtcagcacaaactgcaccgtgtgatcgtcgaccttcttcacttcgctaatcagatccggcagccccatgccttcaaagtattcatagctgccgccagacactttatggtacgggttctgctcgtttttctgccggtcaaaagagaacacgacatcatcggcgttcagctcgcgcgtgggtttgaaatccttgctggattgccatttcacccctttacgtaggtggaacgtataggttttaccgtcttcgctgatatcccacttctcagcaagacccgggatcacttccgtggtgccggttttgaattcaaccagacggttatagataggtacggagctggcatcataggtggtgccagacgtaaagagctgtgggttaaagccttccggcgagccttctgaacaataaaccagggttttggcctgcacgcttgctgcaacggtcatggccaccaggctcaaaccaagcttcagcatccctgacttcttcaaggaaatactcattcttctgctccaattgtgatgtatgttgttttgccctttgcaaaggcttttaccgcccggccttttttgttttttacctggtcaggtcagtagtgagaggtggggattccgttcgcataatcgactgagttgcagtgcggattctccataaaatgcccctcattccctacaatctgtcaatagaatgtcaaaacgtcaatacaggtaaccagcttttacaacaacggtgagaattaacaaacaaagattaaaaaaagttcagaagggtattttcagcagggaaatttgtgctatggccagaaaggcagagttattcacttaatattttgcaacagttagtgattaacaattagacattaattgaaaaatttctttcgatatgttgattatctgagcgattaataccactaacgctaaaacgcacaggcgaaaatgctgaggttatccataagccgtgtgcaaaaaagagttatacggacgttgaaaaacaccatcgaatatgtcacaaaattgtaaataagtaggccgtcgtgcggcctaccgcgatcacaaaaactaacttttgaccctggcctgcgtgcgcttttcgctccagttaaacaacgagttcaccagaatcgccgtcaacgtccccgctgccatgccgttgccaaagaccatctgtacgcccgccgggaaattctgatacaggccgggtaccagtataggtagcattcccatggccagccccatcgccagcgcgtaggttttacccggcgtatgcagtggctcacgcgcaatcatatcaataccgataaccccgataatgctgaagacaatcaccgccgtaccgcacaccaccgaacctggcagacaggtcgccagacgtaccagcggcgcgaatatggcaatcaggattaacaatcctccggcagccgcagtcacgaaacgcgatttcacattagtggtgcgtaccaccccaatattttcgccggaggtgataattaaggaggtgccaaaaatcccccccagcagcgacattaccgcatcaccacgaatggtgcgtggaatcgcctgctgcacattttgcgtggaattgactatttccgcggtcgcaatcgtttgcccggttgcttcagccatagagatgaccgcgtaaatcagtaacggcagcgaggcggagagatcaaaaatcggccagccgaacggcaaaagctgtgggaaactaaacagcggcccgtgactcacaccgctaaaatcggtgctgcccagcgccattcccagcaacgttcccgctaaaaggccgaacatcaccgccagctggcgcaaaataccgctaaacgccagcgcgaaaatcagcgttatcaggatagtccccagcgataaaatgatactggttggatgagcgaagtcggcgctccctggctggccaatgatcaatccgccgtacaggcgaataaggttaatcgacaccattagcagcatgatgccaatgataaaagggggaaaatggtgcaggcagcggcggaaaatcggcaacgcgataaagtagaacagcgaggtcagaattacggcgccaatcgcggtctggatattggtctgtaaagcgatcgcaacgaaaatcgcaatcggcgcgccccccggtaccataataaacggcaaacgcgcgcccacccctttcacacccaggctttgcaaaatagcgcccagaccgcacatcagaaaggtcgcgctaagtaccgaggcggtcaccgtatcggtaaagtggagcgctttggcgatcagaaagacggaggtaatgggggtggcggcaacgaccagcacatgctgaagcgccaaaagtaaggtggtttgccagggtaatgcatcgttatccggcgtagtaaggccaggttgcggcatgattaactcccataaaacatcaaaaaaataaccgccagcgcgggctggcggtctgtattatttcaaccaactaatggcatcagcggcatagcgatgcgcacggaaggcgctgttctgttttccaggaataatgcctttactgaggtgctccggatattcattaaagaacggaatgatatattcccataccgtttcgccttccggggtgacttcaaacaggcggccaaacgccgattcacagataaaggtgttgccgttcgccagccgctgcgcgctccccatatacggcgagaaaaacgccggcgggaagatatcgcgatactgccaggtaatcgctttggtctgcggatcgaactccagcaccgtggaatgcggcgaggtgacgccgggacgcaggttgccgttatcgaaaaccagaatcgacccgttctccatctcaaccggcgtgtgctgctgcgctacgacttccggccctgcatgccagataaccttcccgctctctttatccacggcaatgacgccggaagtggtacgcaggctcatcagcaccaagccatcacgggtgacggacaggccgttaatcatcggccagtggcggcggtcgaaaatatcatgaatcgggaaatcttccggattcaaatgctcccaggcgcgccattcccagaccacttcaccgtcgcgattgacctctttgacgacgtcgctctgaatgatgccgtccggcgcatcgcggcgcgggtcgccgccggtaacacgggcggcgatatcggcaggcaacggcgacgcggcggtatacagcagattaccgttcgccaaccattgcgcatcatggtgatggtaaatatcttcgtaatgccagacgatttcgttatccggcgtcacttcgtagaagtcgccgccgtgccagagatcccacgccggatagaggttcgctgaagtgcggtggctgccgttataacccagattaccgttcggcagcagcaccgcatcacgcccggcgcgaaccggaagctgccactgatgcgcgacttcgccctgctcgtccaccaggtaaacccgcccttcggcggtttgcggcgcaaaaagcgtatagccgccaaagctcttcgccttatcagcgtagataaggcccgccagacggcgtccaagggtgaaagtcgaatcctgagttaagtgtgccacatcgcctcctgaggaataaatttgcgccaaaataccccattaaaacgttttaatgaagggttttttacgatcctcactgaaaaaaagcaaacgttaccgtctggtaaatatgctaccctgtgcgcaaattttcgcaggtcaggaagcagatggctgttcaaaataaaaaacgcgcaaagttgattgatgttgcccgccatgcaggcgtgtcgccagggacagtatccaatgcattgcacaacactcgctttgtcgagccgcagacgcgacggcgtattgaagaggccattgctgcgctcaactacacgccgaatattcgcgctcgccagttacgaaccggcaaaaccaataccattgctttgctctcttcggtgccgctggcgattgcctccggcgcatcacgactgggatttatgatggaggtggcgttaacgtccgcgatgatggcgctggaaaagcagcatgcgctgattctggtgccgccgggggcaaatccactggatgccgtcagctttgacgcggcgatcctgattgagccggcggagaacgacccgcagctccaggcgctggcgcaagcgggcattccctgcgtcaccattggccgcacgccggggaccgacacgcctgtgccgtgggttgagctgcactcggcggcaacagcacagcttctgctaacgcatctggagacctccggcgccagcaaatgtgcgttatttgtcggtaacactcggcgaacatcagttctggagagcgaagcggcttaccagcgctggtgcgcggggcgccaggcccccgtcgtctactctctcaatgaaagcgagggtgaaaatgccggctaccaggccgcgcagcagctattacaggcgcatcccgacgttgacggcgtgctggtgctgatcgatacctttgccagcggcgcggtacgcgctttccaggaacaggcagtcgctatcccggagcggatgcgcgtggtcacccgctatgatggtatccgcgcgcgcgaatcgctgccgccgctgacggctgtgaacatgcatcttgatgaggtggcgcgacaggcaatcacgctcctgtttgccgttttgtcgggtgagaagatcagctacagcgacgggatcatgcctgaactggtggtgagagcgtcaacctgccggtgatagaggatgactcgccactacgtggctcgccctgcgggccgttgctgacgcaacgttctctcgcttcgctcgagtcgaacctcttgcccccggaggttctcatcctcgtcagacttcagatacaaaaaaaccctgctcattgagcagggtttctgaatttggtcggtgatagaggattcgaacctccgaccccttcgtcccgaacgaagtgcgctaccaggctgcgccaatcaccgaatgcgggcgcatcttactgctcaggcgcacgcccgtcaatcccttagtcgcaaaatacaattcaatcggcgagaaagtcggcagacaacctacttcgcggcgactttctgcacatcgggaatatggcaccagttgttgttctggttaatgccgccattcggcgatgtataccccaggcagcccattatcgtatcgtatagctccacatgacgacgcggcactttgatctccgcctgctgtttcaggtgagcgaacatctgcgcatgttgcggactggcaagatatttatccgacatccataccagcatcggaacacggaattgctccggcggcgccatattgcgcggcgtaccgtgcaaatgttcgcgttcgttaatcgactcgccgtggtcagccgcgtagaacacaatcgcttttttatcacgtagctgatcgaacacactggtaataaagtgatccacataggtcacggagttatcgtaagagttgatcatctgcgctttcgtgcagccgctatcgaccccaatacattcgggcttccactgagcgtagctgcgcggataacgctgcgtatagttaaaatgcgatcccttggtatgcaggataatcagatgcttaccctccggattctgggcaagcgagttctgcatctcatcaatcaacagcatgtcatccaccgttttaccgcggttacgcggctcggcgccaatctgctcgcggtaagagatattatccgccatggtattgctatagaaccacatctcgctctgcatggcgtacagatcggaactgaatccgagctgtttgagtacggcaaaaacattctgctcttttaaggtacgctgcgggttattatccgccccgccttcccgtacaaacatacagcgtaaagaaagcttcgtcgcggtatcgcaggaatagccgcggaacgccgccagatttttttcctgcgccagcttcggcgtggtattacgctcgtagccgaaaatccccatgtgatcccaacgggtcgtctcaccgataatgaaaacgacgtaggtgtcatccccatctttcggcgcaacataggtaaatttcctggccgggtttattaacgaattattgtccgacgactcatctacctgcgcccaggcatacagccctaacgcagataaccagtttgagggcaggtaggagttcgccaccacgccgccatagctgggtaagtcgatgcctgtcgcccgttcaacctttttttgctgtatatccagcaggcgaataggcgcccacaccattacgcctgcgagtaccactacagcggcgctgcgaaaacgctgccccggcgtacgtagctggcgcaacaacgtgtagcgacagtggttactccagataaagatgagcggaagcacgctcacggcaatcagccacaatacaaagtgcagccccaccacctctttcgagagatcgatatcggtggtcataacagacgcaataatgccgtagccaatcaccacgttcaggaaggtcatgtaataactggcgccagcggaaaacagcaccaccagcgtggccagcacacgccagacgcgtcggccaaacagtgaaagaagacgaagtaagaagaaagtgaccagcaccgtggcgcccagttcgacaactgcggagaggcctttccaaatggtaaattcttgtgcataactgccgaaacggcggtaaaacacggcgcaattcataaacagaccgatatagagcgcaagcaagaaactaagtttctgttgcgtcatcgatttaatgtatctcatgcaaacaaaccctgggaatcgggataaaaacgacctgtacaacgattctttaatcaaacaggtaaatatgcggctaacgcagatgtaagaaagtctacaagcacggttaagtagaccacaagcagaggggaaagtggcaacggagagtgtgatcggagaagatttttacaaaaaatcactaaaaatggaaaagggccagcgaactggccctcagtgattattcgtatgtgacgctaaaattcaccgtcgcattcgctgtgccaacggtggcatccggcttaacaggcacatagctggcgatatagttcagcttgttcgtaccatcaaaccagacagtgtgttcgacaggcgtagagtcggtactggaggggtattgttgctccccaccagatgttttaatttttaacgccacgcccgtcgcgccgccgctatccagggcaaaaagcgaggggtcagtcgggtccggagaaccgtccatcgtaacgctggcctttgtggcatacgcgcaatcttttaagccgatgctaaagtttttctggttcagctctttacccacttttaccgggcgctgaagcaccacggtctccatattgacgtcgatactgtcgttttccagttcacaggtagccgccttaatagtaatggtaaagtggatatcaccagcagaaccgatattcgacggtgccgccatcgcggaagcggtaagcagtaaacacgctggcatcaaagcatgaaggtttttcatcctgcttactccacatcaatacgcatggtggcaattccctcgaaatccccggcggccggcaatttgccggtggtactgatagggtaagccgaaatggtcgttgaggcggtacggtgcgtgtcgtcaacaagacccgatacgctcagctcctgattaacactggcgtcatttggcaccaaaattttaccgttagcgccctcaatgacggcaccgatatccgggttgcccatgtcgatggcattcgaatcattagcgtttggcattccctcaatacgcaggaagatctttacgccatcggaaatattggtgcatttaaactgcagctctttggtgaatttcgtggcgttctttgcaacttgtcctttgcgatctttaaaatcagtggccttaaattccccaaacggaatttccagcgtgctgccgctggagagttcacagccctgaggtaccgtaattgaaccactgatatatacagacgacgcaggtatactgccatatacactgggtttctttgtcacaaaaaggtccattattttggtgctaggtataatactttcacccacaaacggatggagaatatagagcgataagtgacctttgccaccggatgtccatattgcatctttactacttgcattttgcgaacactgagagcggttgtttgtcaggttacctacggtgtgttaacgtattctcctcgtccccccgaaatcagtacatcgctcgcaatggcaatattattattgatctggtaataggagcgactctctatattcgtaacaaaggccagaggaaccacagccttaaataaggtgtcatttataagagaggtatcatcagggcattcacaggacatcgcataggttccacctaaattccagctatcgaaatctacgaaggtcgcacccgttgtgttctttgacgtatctgaaactgttttatttatggtggcactgaagatatgtgttccaccttcaggagtacatggtccaaaatctgccgctgccagcgcctgccccgaaaacagcaccgacccgcccaacaggcccgtaaacattatcaactttttcaacataatcgtttccttccctgttaccggcagacggcattcgccatcaccacgccggtattatcctgttgttccggcagcgtaaacgccacgcggcattgctgtgcctggtctttaccccagttcacctgaagggcacctttctccggcatcccgctgatataaagctgaccgtcttcacccacaatgctgctggactcttttgtggtatccagcagcgtggcggtagcaccaaacggcaccgctttgccattggcctgcgtcagattcatcagcacacgatagcccactcgggtatcgaagcgggcacgaacaatcgcgccgcgtgtcggcactacgttgacggaggcggtatccaggtcaacctggttgttcaggctgtcgcttcgcagtgagacttccgtttcacggtacggagtaaggtaaggtacgaccgcattacccatccagtccacttccacaccaccgttgttgatcacgtgcgcgccgcgcgcgcccggcgcggagataatggccatggattcacccagcggttgagaaagagtgataccttcgctatgggctatcacaccgccgcgcaaaccgtagttcacctgctggccgtcacggttgtagttgtaacccaggctggcgctacccacgccgccctggtaatccaggttcacgctgccgctgttacccacgccgttgctgccgtagccttcctgcacactatagttcaggttgtggtcttccagcgcggtgccgctcacccctaactgctggttggttcggccatgctgatcggtcgtgaggtggtagttactccacacgcgtcccagtggaatcgacatggagaatgacagtaaacgatcgctctcatcccactccgggcttttcgtccaggtgtaagcaacgctgtagttcacgcggccaatacggccgttataaccggcattcagcgaacgctgtttaccttcatcgttccagtagtcctgctgcgtgacgttaaaatagaccgagccccaggcgcccagttgctgcgtcacgttgccctgaatctgactacgtttgtggtactggctataagagctgtccgcatcgctgcgcacatccgtcgcttcctggaaggtgtaatagccgctggtcgaatacttgtaacccagcagacggaaatctgtaccgctgttaaagctcttggagtagaggaaacgataagactgaccttccgaattctcctcatttgccagcttgctttttgcctgggttacatcgatggagatcgcgccgatataaccgaagtttttacctaatcctcccgccagcgagtaatagtcgtcagagaagatcgcaccaccgtaaacggtaaagccatacggcaggccgtacatggcatcaagctgcccgaatttcggctcggcgctgttatagttcccggcacggtattccccggcggaaaggctgtatttgagatggccttcacgctggaggagcgccaccgaggagaacggctgaacgaacttctgctcactgccgtccgattctttaatggtgaccgtcaggtcgccgctgtttgaggttggatacaggtcgttaatttcaaacgcacccggctgaacaaacgtacggtaaataacgtagttgttctgctcaacggtaacttcggcgttacttttggcaataccccggatgacgggcgcaaacccgcgctggctgtcaggcagcatctcttcgtcggaagttaactgcacaccgcgcatctgaacgctgtcaaaaatatcaccggcagtggaggtatcccccaacgtcagctgtgatttcagcggtacaatggcacggcttaaggatgtgccaatgttatcccatgtgttgttaccgtcgtttcgcgtccaggtgctatagttacgtaaccgccatgcccccaggttcataccgctgcgcagattcagatagtagctgtcgctgttgtagctggtttcactgtcgtgtgcgtcatagctggcgttgctgccggaaaagttataatccaccagcagggcattcaccccttcgtcccactgcgattctggcaccgtaccgcgcgctgtctgcttcatcgcagcctgcgggaagctcatgatcagggtctggtctgcaaagtcgaaatggctggcggcctggggaataatgtcgtcaaaagcaacacaggcttcaggcggggccattttcagcgccgggaagctatcaatacgcacgcccatatcttcaagctgcacgcgacttaagcacggcaccagggattcacccatttttgcgcgctgcgcctctgtcgctgccttaaactccagggtgcgagactccatttttttttcgttgaccaccaccgagacgcggtatttacctggcaggtgttcagctttattggattcatacattgaaaggtcaacgtgctgatcaatacccggcacatcctccagaaagcgcgggttaaatgttcccgcatacgcggggagcgtacccgctatcatcagcgcaagcgcagactgcgtgaaacgcgaggtcttattgcccagaggaagatgcgtccatgtcatagtaataatcctttaaaacgtgttagttaacgcgctgtgtcaacatgtcgccagcagtgccaaagtcattaataatgttgtatttaacttcgcttaccttgccggtgccggctggcagttcaatattcaatgagccttttgccggaaccattcccgttttttcaatatcacggccgttggcataaaatttattaaacgtcaggttaaaggcagatgggttttccactttgatctggttagcccctgcgctggtgaactgcagtttgttccagccgtccatgctattgcctttcaggcccgccgggcgatagaacagttttaagcgggtacgtacggcgatctgcagtacgtttttagcttccgcgtcttcacttttggcaggaatagcttttacgttaatccaataaacggactcgcgatcctgcggtaacgtgttcgtcgtattaacaatacgtaaaacgttatttttagtcgggcttaatttaaataacggtggagtgatgataaagggcgtctttttattaccgttagcatcatcaatccatgactgaatgagaaattcatccgtggtgcttttattatttaccgtaagagaagcttcctttctactaccgtcataaataacacgcgtgctgcttaatgccacgcctccggcaaaactgttttgagcaatcaacgccagcaccagtgctgtgcaagatatcaaacgtgagcggttcatgattctcttcctgagcctccgctggaaaaaatggcaacgggatttccgttgccattatgattgtctgtattaacgaaaattcgattattcgtaggacaggttgaagtccacttctgcgttaccgtaaccagtggttacagtatcttttgttgcaacgtagttagcggtgtagtacagcacggtctgaccagcagccaacgtagtggtggatttaccggtgttcatttcaacaagcttgttagcgttgtcgtagataccgatgcccacgccagttgccgcacctgcttcagtgttaacagaaaccagtgtcgcatcgtctgtatcaccaacgccattgaagcttacgttaactttggtattagaggtgatgtcacagtcttccagtttgatctggaaaggcttagaagaagacttgtcgccaatggctttgaagatatttttcttaacctgacccagcacaacttcctggttctgggagtcagtagaaacgacgcatggcgcgtcaacgatttcaccggtgaatttaatggtgccgtcaccagattcagcagcgaaagcagaagtggaaactacagcgagagcagacagagcaaaaacaacctttttcattaaaaactccatttatgacggtagataacagaacgcatccttaggattatctgcattctgtgaggaaatggagtgtatagaggtgggtattggatactataattagtatatataaaaataattgttagttaatcttaaaaagaatagaaatcaatatattacaaatggaatgtacataaatgtaattttttattaagaataaattaatataattaatatattatttcttcctattcataaataagttaaatgtcttccttatttattagacgtttttttaactacaattgattaggtatttgtgctaaataaaaaaaagggcaccaaatgggtgcgctgtacgcctggtgttgcatgtgttacgcagacgcttcgctaaccccctcccgctgcggctggcgaatagtggtggaaagtgccagcgagataattaacagcgcaaagataacgcagaaggttagcaccctacttccgccacaagagctgttatcactgcgtttcgattataatttttaagttaaaacctggcgctcacccccaaggtatacaaataatcgctatccgtagcgctattttccgcctgggaaaacgccgcatacgccgccaggtgcgggttaagtaacacgtccgcgcctacggtgacatccagccagtttcccgcctgatttcctgcggtcatacgactcaacccggactgcgctttccagatattctccccaaactgttggttatagctgatttgcgcccagggacggacatcgccgaactgcgagtttacccgccagcctaacgtactgacgctggcgtgccataacggatcggtaaacgctaatgtcgtcgcgctatcgccatattcgttatacattgatgacgtcgaaccgtcgtaatgcagcgccgcgaccggcccagtggtcacgcgtcgggaaagcggaaaattccagcccatactgataccgctggtcgcatcaagcggggtttcatccgccaggctaagcaccggccccaccgtattttgcgtagactgaatacgttcggccagtatgtcgttgtaattcggttggtgatcgctgtcccaggtatagcgttccgtcgtatgccccggagccgcttcagcgatatattcttgttgccaggcatatgtggtattgataaaaaacgagcaggccataaggcccgccagacaacgcaatgtccggcgaccacggcgttttcttacaatcatcaacgcgactccagagtagagccgaattcggcgatattattgtcattgaatgaaggatgtcgggcatcagccctgtattaactattgtccttttagcgggcccgtcaaggcgggttgaaggaaattttcgcggtaaccacaataacgaggaagtctatgcagcgttgcgactgggtcagccaggaccccctttatattgcctatcatgataacgagtggggcgtaccggaaactgacagcagaaagctgtttgaaatgatctgtcttgaaggtcaacaggccggtttatcctggatcaccgtgcttaaaaagagggagaactaccgcgcctgttttcatcagtttgatccggtacgcatcgcagctatgcaggaggaggatgtcgaacacctgctgcagaacacgggcatcatacgacatcgcggtaaaattcaggccattatcagtaacgcccgcgcctggcttgcgatggagcaaaacggcgagtctttcgccgattttgtctggtcattcgttgatggccagccgcagatcacccaggcggccagcctggatgagatccctacctcaacacctgcgtccgatgcgcttgctaaggcattgaaaaaacgcggtttcaagtttgtcggtacgactatctgttactcctttatgcaggcgtgcggactggtcaatgaccatattaccggctgtttttgccatccgggagaaaaacatgattcgcaaatcccagagtgaagacatggcgtctattctggcgctgtggatgaaaagtaccatttatgcccatccctttatcgaagaacgttactggcacgagagcgaagcaattgtacgcgacgtctatttacccgccgcgcaaacctgggtatgggaggaaaatggacaactgaaaggcttcgtcagcgtactggaagcccgttttgtcggggcgctgtttgtcgcccccgacgcgttaagacacggcattggcaaagcgcttctggaatatgtccagcaacgttttcctctgctgagccttgaggtttaccagaaaaatcaatccgccgtaaacttctaccatgcgcttggttttcgtattgaagatagcgcctggcaggaggataccgcccaccccacctggattatgagttggcaggcggatcaaacgccgtaagcggtagcgccgggccggtatatttctcaaaccagaccagcgcggtgttgcccgcacaaccgttccccagccgggaactgggaagatcttttgtcaggacgtttaccgcaccgtttttgcatatgccgcctgcggtaggttcagggtccggccatgcgccttcgtgaatacagatcacgccaggccgaattccgtcggtaacgaccgcgcccgccagaacctgcccgcgatgattccagacgcgtaccgtatcgccatcgacgattccgcgcgttgtcgcatcctgcggatgaatcgtcaccggttcgcgtccggccaccgcataccgctcccgtaacgaactgtagttaagctggctatgcagacggtgcgccggatgcgcggaaagtagctgaacctgccccgcatcggcgttcccgtgccactcatccggcgccagccacatcggatgaccgggacaatccgcataaccatagctggcaatgcgcgcagaatagatttcgattttgccgctggccgtttttagcggatggttatcaggatcgcggcgaaaatccgcgaagcgcacaaactgcgcgttggcgggattttccggcatctccagtaaacggttagcctgccagaatgcggcaaacggcggcagcgtcaccccctggctggcgccacgctgggcggcaatattgtagaaagtctccagccacgccagctcgctttttccttcggtgaaccgagcgtaaccgccggcttcccaccgttcgctcagttcagcaaaaacgtcaaaatcattccgcgcctcccaccggggcgacacgacctgcttcatcggcgccaaatgctgattgctatagtcgccggtcatggttaaatcgttacgctcatagctagtggtcgcaggcagaacaatatccgcgtgtttcgcggcggccgtccagaaacattccgagataacgaccagttccggtttttgccacgcgcgaatcagacggttggtatcctgatgatgggtaaagttcgcgccgcccgcccaccagataaaacgaatatccgggaagcggcgatccatcccattgtgttggtaaaacccaccggggttttccagcgcctcgacaatacgcgccaccggtattttatctaccgcatcgaccccgccagggatgcttccctgcatcgaggctaacacggcggcgcggcgcgtcgggtttccgccgttagcaaaatgataagaaaaaccaaacccgccgccaggcgtaccaatttgccccagcattgcggccagcgtaacgatcatccagtgcttttgctcgccgaactgctgacgctgcattccccagccagccatcaacatggtggtgttatgatgaaatatttctgccagttcgcggattttcaccgcagaaacgccgcaaatttccgccgcccattccgctgttttggccgtaccgtcggtcgtgcccaaaagatagtcggcgaagcggtcataacccgttgtgcagcgggcaaggaacgcttcatcctgccaaccgttttccaccagcgtatgggcgatccccaacattaacgccacatcggtgcccatatgcggggcgatccactccatcttatcgccaaaaaagtcgacgctttccgatcgcatcggatcgatgcagatcaggcgcttgccgctttgtcgcaacgccgcaaaatagtcgagcccctgttcatccgaggcattccaggcaattttcagagtattcagcgggttcgcgctccagagcaccaccacctcgctgtgttccagcaccaccggccagctagtctgctgctggtaaacctcgttgccacccaccacataaggcatgatagcctgcgccgcgccggtggaataatcgccaagatggccggtataccctcccgccagcgccatgtaacgctgcaatagtgtagccgctttatgcaatacgccgttcgaacgccaaccgtaggagccggcgaagatggacgatggcccataactttcgcgaatacgtttgtgctgagcgtggatcagatccagcgcgtcatcccaacttacgcgaacaaactcatcctgcccgcgtatgccttgcggcttatcgggagaagccaggaaccctttacgcaccatcgggaagcgaacccgcgttttactgtgcacctggtcatgcacaacggtttgcagggagttttggtgtgccgtcgggagttcgccatacgaggcaaaaatgcgttctccgtcggtttcaacgcggactggcccccagtgtgcggcggtcaataccgagtgacgcgatggtgcgtgggtcaatgttcgctcctgaattattgggattatttattttgccgatcaatgttacttacaaatttcagagttttccctggaattttcttcatgtgcagacgtcataatcaaccgccacggtcgctgtggtaaaaataaaaaagtgataaggatttaagatgaaaaaacgtgtatttgtgattgctgccatcgtgagcggcgccctggcagtatctggctgcacaacaaacccttacaccggcgaacgcgaagcaggtaaatccggcattggcgcgggtattggatcgctggtcggcgcaggcatcggcgcactctcctcctccaaaaaagatcgcggtaaaggcgcgctgattggcgcggcggctggcgcggcgctgggcggcggcgtgggttactacatggacgtacaggaagcgaaactgcgtgacaaaatgcggggcacaggcgttagcgtgacgcgaagcggcgataatatcattctgaatatgccgaataatgtcaccttcgacagcagcagcgcgacgctgaaaccggcaggcgctaacacgctgaccggcgtggcgatggtgctgaaagagtatcccaagaccgccgtcaatgtggtgggctacaccgacagcaccggtagccacgatctgaatatgcgtctgtcgcaacagcgtgctgactccgtcgccagttcgctgatcacccagggcgttgacgccagccgtatccgtaccagcggaatgggtccggcgaacccgatcgccagcaacagtacggcagaaggtaaagcgcaaaaccgccgcgtcgaaattaccttgagtccattgcagtaaactaccgtaccgggtaaggcggcatgctttacccggcctgcattattccctcgccagaccggatacacctcgcattattcggtattcattcaccatttaccacgatacggctgccgacaacgggaaaatcggctggtcgattattgctaagcgggttaataataagcctgttccggttggcgcatgccgcgcttaccttttgatttacggagagtcgcatgaagccgtccatcattctctacaaaaccctgcctgatgatttgctgcatcgcctggaggcgcattttaccgtcacccaggtaccgaacctgcatccggaaacggtagcgcaacacgcgcaggcatttgccagcgcgcaaggccttctgggcgccagcgaaaccgttaaccgcgcgctgctggaaaaaatgccggcgctacgcgcggcgtcaaccatctcggtgggatacgataatgtcgaggtggacgcccttactgcccgcaaaatagtcctgatgcacacgcctgccgttttgacggaaaccgttgccgatacggtgatggcattgatgctggccactgcccgccgcgtggtggacgtcgcagaacgggttaaggcgggtgaatggacagaaagcattggcccggcgtggtttggcgtcgatgtccatcacaaaacgctcggtatcgttgggatggggcgtatcgggatggcgctggcgcagcgagcgcactttgggtttaccatgccggttctctatcacgcccgtcggcggcatcaggaggcggaagaccggtttaacgcccgctactgcgatctggatacgttgttgcaggaggctgattttgtctgcgtgatcctgccgctaacggcagaaacgcgacatctgtttggcgcaacacagtttgccagaatgaaatcgtccgccatttttattaatgccggacgcggcccggtggtcgatgaaaacgcgctgattgccgcgctgcaaaacggtgaaatatatgcggcaggtctagatgtctttgaacaggaaccgctatctgtggattcgcccctgctgaacatgtctaatgtcgtcgcggtgccgcatattggctcggcaacgcatgagacgcgctacaacatgatggcctgtgcggtggataatttgattgatgcgctgcagggaaaaatagagaagaactgcgtcaatccgcaagcggcgggataacgctacaggcccgataagcgctggcttgcgcttatcgggcagactgtcattactgggtcgcgtttaccgccgccgtccaggcctgattaaacgcctgatgctgcgaggccaacggcccaatcaacgcattatattggctggcctgctgtgaggtcgggaactgaatgccgttcgcgacaaagctcacctgctcgccctgttgcgcaatataatcgcccacttgtaccaactgctgcgtaaagatctgcgccgccgggatcagcggctgcaaagcatctgccggcacggtgactacttttttgtagacctgatcaaacacaggtttcaggtcatcggcctgctttaacgcgccatgcgcggcatcagcctgcagttttgcattctgcaactgttgcgccagcacgcctaacgaaccatttgcctgccgcagcggctcgcgttgcgtcatataatcctgcggaacgcggatggcgttaacgctatcgaccaccgggcgcagaccggaatccatcgcctggtttacctgctgcgagtagccatacagtatcgcgtaatcagacacgaacggaccaaactgttttttctgatcggccgtcagcgttggtaaacgctctccgctacgcattgctgtattctgcaggaaatcgacaaacgctttgcgctgatcgccttctttatcaaaacacccgctcaggctaaacaccattaataacgccacaacaggcgcaaaccagcgagagcaggacttacctgtcgccattgttaatactcctttcacccaaaaatgcgcacaacgacacctgcgtgcctgacggcttacaaggatagtccaggtcaggcttgcaggataccctttccacgcgatcttgtagcggaaaattatgtttatctgcatcaatgcttaatttgttattttattgttaatttttgacctgacactgcgataaaaaacgcggcaagaaagctttccagcggggagtgtaatatttttttaatctttacaattattttctgaaagacggatataccttcctggatcaaattgttagcgtcctaaaagtcgcgtagcgtaaggcatcgaaacgaatcgatagcgcttcctggcggcgcgtcgccccccacccgcaagtttcccgactattcttaagaggcttcgatgcatttcacgatcccgctgtgtgatttacaggagttctcaatggaatataaagatccgatgtttgagctgctgagcagcctggaacaaattgtttttaaagatgaaacgcgaaagatcaccctgacgcaaaaacccaatccttttaccgaatttgaacagttacggagaggaacgggactaaaaacagatgaattcgccagagcgctgggcgtaacggttgccatggttcaggaatgggaatcgaaacgcgaaaaacccacgccagcagagcttaaattaatgcgcctgatacaggcgaacccacgcttaagtaagcaattgatggagtaatttttacccctttctgtttttaacggtcctgcgtaaggaccgttttccccgcccgattactggcctggagaaataaagtaaaataaaagttgcatcgcccgccattacatgagttaatgtgctcaacggtttgacgtacagaccattaaagcagtttagtaaggcaagtcccttcaagagttatccattagatacccctcgtagtgcgcatttccttaacgcttaaaaaatctgtaaagcacgccataacgccgaaaggcacacttattttttaaaaggtaatacactatgtccggtaaaatgactggtatcgtaaaatggttcaacgctgataaaggcttcggctttattactcctgatgacggttctaaagacgtgttcgtacacttctccgctattcagaacgatggttacaaatctctggacgaaggtcagaaagtttccttcaccatcgaaagcggcgctaagggcccggcagctggcaacgtaaccagcctgtaagcttaaaaagctcagcattttgaatccctgcctgatggcggggattttttttattccaattcccccctctcccccagcataactttgcattactttaccctgcgtccctttgacctttcccttaggggaacccctatagtaggcagggagattgttcacaaggaattgaagttatgtcgaaatcatcatggttattacttttgggtttatgcgccagcggctccgcgcttgcggcatcctcagaatccgcttttctggcgcaacatgggctggcgggaaaaacggttgagcagatcgtggatacgattgatcagacgccgcagagccgtcctttgccttactccgcgtcgattaccagtaccgaactcaaattatctgacggagagcagatttatacgctgccgttaggcgacaaattctatctctcttttgcgccctatgaatggcggacacacccctgttttaaccacagcctttccggctgtcagggagaaatgccgaataaaccgttcactgtaaaagtgacagacagtaaaggcgctgtcatcgtacaaaaagagatgcaaagctatcgaaacggatttatcggtgtttggctaccgcgcaatatggaagggacgctggaagtaagctacaacggtaaaacggcgtcacatgccattgccaccagtgatgacagccagacctgtctgacggaattaccattacgttaaaaaaatgcccgataacataatgggttatcgggcctataaaacgccaacaagataaaattaacagagtgccttgagaatgcataacgccacaagaatggcagaggtgggctcactttgtactgaccccaaaaacctggacagattaaccgaggcatcagcgaaagagtccatttaatacatgggctcttttttgtttctggctataactaaataacattgtccgcaatcgaattatccattccgttgctttcttgcatcacgcggattcctgtctcatcaatattttgttcgtcgtattcttcctgaatttaaccttagacattctatcaaattatcgcttatagcgatttgaacataacagtctttgcattctattgagggagcctaaggaacaatgttcgctgctgagtttgtgatgatttgaaaccatggtgaatgtagaaatttttggcttcttcggtaagtgcatgaaccatgattgcacgtacaccaatattctcggcaacccgatagcaacgaagcactgcatcatgaagtaaatcagcaccaagcccttttccatggaatgagagatcgacagcaagacgggcaagtataatgacagggatgggatctggcatgttacgccgaaggttgcctgtcgcttctgtatggttgacgctaccggtggccagagagtaaaaaccggctacttgcttcgtgtctttcttgcacaccacaaatgttctggccgctccgagagcctggtttttgaggcccttttgcttcaaccagtcatcgagcacagcttcaccgctgacgaactcagctacctgatgaaaagcggacaaaggttctggtgctgttacacgtcccactgaggtttccttgccagcagtttttcgataacgggatcatctgcgaccggtgcatcaagcagattgatgaactcctcatattgctcatcgttaaagttaaatacacggcggtcaaggatcactttctcggcagcctggcaggccgtttccagaatgaaatctgtacgtgacttgtgaaggatttccgcagctgcatcaatgagcgcccgctgcgattccttagctctaaggttaagttgaacatctgatttcatgagacaccccttgtatagcatttgctttacaagaatagcacaaccaccatgtatagcaaacggtatacatcaagtcgtcgtttttcattttttgaatactgatgttcgctttgtgccagaagcggaaattgctcattgtagcggtttactgagttcaacaaggcaaaagaacaatgctgcctttctgcaggctgactattatttcgccaaacatttcctcatcagagcattttgtaatgtcactccacggcaaataggaaagcctcgctccactatatgaaagccgtgtcgtagaaagaacacttccgcagccttacttacatttgaagtaagttcactaattccacgctgtctggcttcctcatgaatgcaattcatcagtagtgtccctaccccctgtcttgaataggttcctgatacaaagaaatgatcaatgtatccatttggttgaacatctgcatatccagctatttcaccatccagctctacaacaaaaggttgtaattccttaatgtgattggcccatcgctccaggtcgatatctgctggggcccaagcatcaatttgttcacgtgtgtagtagtgtgatgcgatcgtatgtacagatgagaaaaaaactctgaataacgatatttcatccccattactgaaccttctgattttcataaaacctcattgtgagagttacttgtagaacaatactaatttttgtgaaatagggcgtccgttcctcgctcatagcagacatttgcgtgaccgtatccaccaacgttcaggtttcctgatagcatccctgtacagaccttgttaatttctgcctggatagctctttaggcgctattcaaccgggctgagtccgttaaatttaaggctaattcgtcgggtattgtagtatcgtatgtaatcctcaatagctatcttaagttcatcaatatccttaaatttactggtgtaaaaactttctgattttaaagtcccgaaaaaacattctgcacaggcattatcaaggcagttgcctttgcgggacatactttggatgatgccaaactctcgtaactgatactggtaccatcaatgacggtattgccagccctgatctgaatgaagaaccggattggtacccgcatcaagtctggcagtaccgccagcgttaatgtattcctgaaataattcttgccaatcaatagagataaccgcgtctatgagttacagaattattagcgaatcaactaatactatttatgttataaaaaaacctgcccgagagcaggtttttgtttatttaactgaacgcttattgaagtaacgaaatatccgcaacctgcaggaacagttcgcgtagtttcgacaacagcgtcaggcggttgatacggatatctttctcttccgcgttaaccatgacattttcgaagaattcatccaccggagcgcgcagagcagccagctcaatcaacgcttcctgataacgaccatcggcaaagtacggctgaagcttatcacgcagcacaaccagatgtctggccaactcaatttccgccgcttctttcagtacggaggcgtggacgatatcgttcagcggctcagtggctttcgccaggatgttggagacgcgcttgttcgccgccgccagcgcagaggcttcttccagggtgcggaaatgagacaccgccttcatgcgggcatcaaaatctgccggacgggtcggacgacgcgccagtaccgcctggatagtgtcgacggtgtaaccttcatcctgataccaggcgcggaagcgacccagcataaaatcgatcacatcatcgactacgttggcattggtcagcttgtcgccatacagacgcaccgcttcttcggtcagcgtttgcagatcaagagcgaggttcttctcaacgatgatgcgcagcacgcccagcgcggcacgacgcagcgcaaacgggtctttgtcgcctttcggatgctgaccaataccgaagatacccgccagagtatccatcttatcggcgatcgccagcgcgcaggccaccgggttagacggcaggtcatcaccggcaaagcgtggctgatactgttcgttcagcgccacggccacatcttccgcttcaccatcatggcgcgcgtagtgcatccccatcacgccctgggtgtcggtgaactcgaagaccatgttggtcatcaggtcgcacttggagagcaggcccgcacgagtggcgtggttgacgtcagcgccaatctgaccggcaatccagcccgccagcgcctgaatacggtcggtcttgtcgcgcagcgtgcccagctgttgctggaacagcacggtttgtagacgcggcagatggtcttccagacgttttttacggtcggtattgaagaagaattcagcatctgccagacgcggacgcaccactttctcgttaccggagataatctgggtcggatctttcgactcgatgttggcgacgaagataaagttcggcagcagcttgcccgcgttgtcataaaccgggaaatacttctggtcgcccttcatggtgtacaccagcgcttcggcaggcacggcgaggaatttctcttcgaatttcgccgtcaataccaccggccattccaccagcgaagctacttcttccagcaggctttcgctcaggtcggcattaccgccaatcttacgtgctgcttcttcagcgtccgctttgattttggctttacgcgcttcgtagtcggcaatgactttaccgcgctccagcagaatttgcgggtactggtcagcattgtcgatagtgaactccggctcacccataaagcggtggccgcgaatgacgcggtcagactgaatacccagaatagtcgccggaatgaccttatcgcccaacagcagggtcacggtgtgcaccggacgcacgaagtgtacgtcagacgcgccccagcgcatcagtttcgggatcggtagtttcgccagcgaggtggctaccatgttcggtaccagcgcttcggtactttcgcccttcacgtgggcacgatacagcagccattcgcctttgtcggtcttcagacgctcggcctgatcaacggtgatcccgcagccgcgcgcccagccttctgccgctttgctcggtttgccttcggcgtcaaacgcctgagcaatcgccggaccacgtttttcgacttcgcgatcgggctgagattcagcaagattcgccactttcagcgccagacggcgcggggcggcaaaccattcaacgttaccgtgcgcgaggccggcgttatccagctccgcagtgaagttcgcagcaaaggactcagccaaactgcgcagtgcttttggtggcagctcttcagtgccgatttccaccagaaaagttttctcagacatggccgcctcttacttgtctttgttgcacatcgggaagccgagggcttcacgggaagcataataagcctctgccactgctttggtcagggtgcgaatacgcaaaatgtagcgctgacgttcggtgacggagatagctttacgcgcatccagcaggttgaagctatgggcggctttcagaatacgctcgtaggccggcagcggcagcgggttttccagcgccagcagctgctgggcttctttttcatactgctcgaagcaggtgaataagaaatccacatcggcgtattcaaagttataggtggactgctccacttcgttttgatggaacacgtcgccgtaggtggttttacccagcgggccatcgctccagaccaggtcgtaaacgctgtccacgccctggatatacatcgccagacgttccagaccgtaggtgatttcaccggtcaccggcttgcactccaggccgccgacctgctggaagtaggtgaactgcgtcacttccatgccattcagccacacttcccagccgagtccccaggcgcccagcgtcgggttctcccagttatcttccacgaaacggatatcgtgaatggtcgggtccatacccagctctttcagagaaccgagatacagctcctgaatgttgtccggagacggcttaatcactacctggaactgatagtagtgctgtaagcggttcgggttttcgccgtagcggccatcggtcggacgacgagaaggctgcacataggcagtcgccatcggctctggccccagcgcgcgcaggcaggtcattggatgagaagttcccgcgccgacttccatgtccaatggttgaacaatggtgcagccctggcgagcccagtaatcctgtaaggtcaggatcaagccctggaaggtcctggtatcaaacttttgcatattatttcgtgctggatacgtgtggatttaaaggaaggagccagtatacccgctggatgcgagatatacagtatgaaaccggtttgtttagcgaaaattgccggatttcgcggcatcacacctcaccaggcgcggcttttaccgcatagaaagatgtaaaaactgcccatctgcatcaaaagagcagacaaaactctctttacggaaagtattaccacgcatctcatagctcccctgaaactgttcgaaaccggtaacagcaattttctgtgcgccagtattgtaacgctgcgccgcctgagctttacacaatgcttccatatccagcgtgcgtgttgggctcactttactctgctgggctttttgcgtcggtggaggtgtcgctgtgcatcccaccagagcgatggctatcatcacagaacagaaatacttcattatcatttttattaccgtctggtttgctggtcagtcttattattaaggtttgtgggtagcagacacattgtgcgaatctccttacgccatcacaagatgtagcgtagaaagtcggatttttccagtgagccaccgcgctggaactctattgaaacggaagctgaggaactgatgcagcctaaaattaactggattgataacctgcgagggatcgcctgtttaatggtagtgatgatccatactacaacgtggtacatcaccaacgcccacagcgtcagcccgctaaactgggatattgcgaatgtcctgaattcggcttcgcgcgttagcgttcccctgttttttatgatttcaggctatcttttttttggcgagcgctgcgcgcaaccgcggcattttttacgtatcgccctgtgccttatcttttacagcgttgtcgccctggcttacatttcactttttacttcgatcaacgtcgagctttcgctaaaaaatgtgctgcaaaaacccgtgttttaccacctgtggtttttctttgcgattacggtgatctacctggtatcgccattaatccaggtaaaaaacgtgagcggcaaaatgctcctgatgctgatggtgatcattggtattattgctaacccaaatactgtgccgcaaaaaatcggcggcgttgaatggttgcccatcaatctgtatatcagcggcgacacgttctactacattctctacggtatcctgggccgcgccattggaatgatggagacgcaaaagtcatcgctgacgcttatctgcactgccctgttcatcatcgcggtatttgttatttctcgcggcacattgcatgaattacgctggcgcggaaattttgccgatacctggtatctgtattgcggtcccatggtgtttatttgcgccgtctcactgttcacggtagttaaaaataagctgaatgcgcggacgttacctggactggggcttatctcccgccactcgttgggcatttatggtttccacgcactgattatccatgcgctacgtactaatggtctggagttaaaacgttggccgccgttagacatcgtgtgggtttttgccgcgacggtgacaggaagcctgctactttccatgctgttacagcgtattgataaacggaaatgggttagctaaacgacaatgatggctccggccatcattcatcatcactgtaggaagcgtaaagatcggttccatatatactgacccccagcgccaccagacacagtattttcagcgcgcccgccagcgccaggttaaatacgccgaccgcgaccatgccgatgccaagcaacagcaaagatttgcaacgagaaagcaagcggccatttcccgtgtgttcctggcgaattaagactggaaaaccacacatgacgattgccgcaaaaaaatatcccttttcgcttaatgtatgacagcctggccacagtcccaccaggtataccactgcaccgacaactaacattcccaggccgaatatccgtttcctgcgcgcaacgtgatcgtccatctcactctccttgtggttgtgtgagacacattaagcgaagaaatagcgatgaaaaaggcgcctgctcagcaataatataaaaatcagaaaacacacatacttacttcgatataattcaatagaattaatatttacgggaaatgcctttcagccaaaactgaaaggcattctgacttatgacatcaacggcaacagctgctgataaagtcgacggaaggtttcacgacgttgttgataaaccgcatgacgctgcgcatcaggataatgcgcctgctccagcggcaactgcggcaatacatcggcgagcggggtctgtttattcaccgcaatttgcgccagacgcgccgcgcccagcgctggccctacatcgccgccagtacgataatcaagctgtagcccgctaatatcagatagcatctgacgccagtattcgctgcgcgccccgccgccgataagcgtcacgctggcgggtttgacgccgcaggcgtgaaccacatccataccgtccgccaaagcatatcccacgccctccagtaccgcccgcgccagttccgccgggccatgctgatgggttaaaccaaagaaaacgccttttgcctgcggattattatgcggcgtgcgctcgccggacaggtacggcaaaaaccagatcgaatcggcatgctcatccgcctgctgtgcggcggcaatcagcgccgggacgttctcctgcccggtgagtttagccgcccagtccagacaagaggcggcgctcaacatcacagacattaaatgccagcgttccggcagcgcatggcaaaaactgtgtactgcgctctccggtttactcagaaagccgtcgctgacggcaaaatagacgcccgatgttccgagtgagagcatcgcctgtccggcatcgatcattcctacgccgaccgcgccagccgcattgtcgccgccgcccgccaccacaggtactgctggcattccccatgcgctggccacctccggcagcaacgttccggtaatgtcactaccttcaaataacgctggcatctgctgtcgggttaaatgacaggcgttgagcataacgtcgctccagtcgcgctttttcacgtccagccacatcgttcccgccgcatccgacatatcgctggcaaagacgcctgtcattcgcagccgcagaaaatctttcggcagcagaaccttgtctatctggtagaaaatatccggttcgtggcgctgcacccagactaatttgggcgcggtaaaaccgggcatcatcagattaccggttatcgcacgcgactgcggcacctgtttttccagccaggcgcactcttcgctacagcgtccgtcattccataaaatcgctggtcgcagaacctgctgacggctatcaagcaatgtcgcgccatgcatttgtccggcgatgcccaacgcccggacgccacttaacgactgttgccgacctaaacctttaaccgcacgatccgtcgcctgccaccactgctctggttcctgttccgaccataagggatgcggacgcgatacggtcagtttttcagtatgcgtagccagcacatcgccctgctcattcaacaggatagcttttacacccgatgtaccaagatcgatcccgatatacatagtgtgggttcctttactgaaagcgcccggcagcgctacgcttaccgggctaatcacgactacaggccgggctaacgcggagtcgcccggtagatagggttatttatcaaacagataacggttaaccagattttctaacagctcctgatgaccgctttgatgtactggcgccagattatgctgctccgcatactgcgccagttcgcctaaggagagttgtcctttcagaatctgctgacccagctcgccattccagccggcatagcgcttcgccacgcgtttatccagctcgccgtcttcaaccatacgcgcggcgattttcagcgacaacgccatcgtatccatcgcgccgatatgaccgtagaacagatcgtatttatcggtgctctggcgacgaactttggcgtcgaagttgagaccgcccgtcgtgaatccgcccgctttcaggatttcgtacatcaccagcgcgttctcttcaacgctaatcgggaactgatcggtatcccagcccagttgcgcatcgccgcggttggcgtcaacggagccaaaaatacccagcgcgatagcggttgcgatttcatggtggaacgaatggcccgccagcgtcgcgtggttcgcctcaatgttcactttgatctctttttccaggccgaactgtttgaggaagccatagaccgttgcaacgtcataatcatactgatgttttgtcggttcctgcggtttcggttcaatcagcagtgtgccctggaaacccattttatgtttgtgctcgaccaccatttgcataaagcggccaatctgttcgcgttcctggcgcagatcggtattcagcaacgtttcataaccttcgcgcccgccccacaggacgtaattttcgccgcccagtttatgcgtggcgttcattgccgtaaccacttgcgtcgctgcccagctaaagacttccggatccgggttagtggcggcgcctgcgccatagcgcgggttggtaaagcagttcgccgttccccacagcagttttacgccgctctgctcctgtttcgccgccagcacatccaccatctgcgcgaagttgtttttatattctttcaacgacgcgccttccggcgacacatccacgtcatggaagcagtaaaaaggcacattcagtttgtggaaaaattcaaacgccacatccgctttgcgtttcgccagctccagcgcttcgcccggttgctgccacggacgattaaacgcgcctacaccaaacatatccgcgccgttccagcagaaggtatgccagtaacaggccgcgaaacgcaggtgatcttccatacgtttacctaaaaccagctcgtcgggattgtaatgacgaaatgccagcgggttagtcgattgagggccttcatagcgaacacgatcgagttggtcaaaataagcctgcatagtgagctccataatcagataagacggcaagtaaacgacataacgtcatactggaatttcctgatttattgctcaattacgttatttcacaccgctattaagagaatccccaaatgtgctctggctctcaaaaaaacgctgaaaaccacagaagaaaaaagcgatcgcgatcgaatcctggcaaataaacaaaaaaccgtaatatatagataagaaatgacaattgtcatccgccgtttgctgtgatgaatttcgcataacgtttcaggcgcaaaataatttgtcatcattcgccagaccgttatgtcagccgttttgatagtatccatgagtccaggttcacttttgcaggatatatcctcatgtttgataaacgtcaccgtatcactctgttatttaacgcgaataaagcctatgaccgtcaggtagtggagggggtgggtgaatatttacaagcctcgcaatccgaatgggatatatttattgaggaagatttccgtgcccgtatcgataacattaaagagtggttaggcgacggcgttattgccgattacgatgatgacgatatcgcgcaattattggccgatgtcgacgtacccattgtcggggtcggcggttcttaccatcttgctgaaaattatcctgccgttcattacatcgccaccgataatcatgcgctcgttgaaagcgctttcctgcatttaaaagaaaaaggcgttaaccgcttcgtgttttacggtttgcccgactccagccgcaaacattgggcggcggaacgggaatacgcctttcgccagctggtcgccgaggaaaaataccgcggcgtagtctatcaggggctggaaaccgcgccggaaaactggcagcacgcgcaaaatcgcctcgccgactggcttcagacgctgccgccgcaaaccggcatcattgccgtaacggatgcccgcgcccgtcacgtattgcaggcctgcgaacacctgcatattccggtgccggaaaaactttgcgttatcggtattgataacgaagagttaacccgttacctgtcgcgcgtcgcgctttcctccgtcgcgcagggggcgcggcaaatgggctatcaggcggcgaagctgctgcaccgtttgctggcgcgtgaagagatgcctttacagcgcattctggtgccgccggtgcgcgtcattgcgcgccgctcgacagactatcgctccctgaccgatccggcggttatccaggcgatgcactttattcgtaaccatgcctgtaagggcattaaagtcgagcaggtgctggacgcggttgggatttcacgttcaaacctggaaaaacgttttaaggaagaagttggcgagacgatacatgcgctgatccacgccgaaaagctggaaaaagcgcgtagtttgttgatttctaccacgttggcgataaacgaaatttcgcaaatgtgcggctacccgtcgctgcaatatttctattcggtgtttaaaaaggagtacgtcactacgccgaaggagtatcgcgaccagcatagtgaagcgttgttgtagtttatccagcctacagatgccttgtaagccggatagcgtagcgccatccggcacacagaattacatatgcgcggcgatcagacgctggttgtcctggtacatcgcgaacaagtagttgttatagcgcgacccctgggtagagtaacccttcagcttatgaatcatcgccgtggcggtgacttcctgatccgccttacgcagttgggcgcgcgacttgcggaaagaagaataagccggatgcgtgttcaggttggcgacatacgcgctcaccgactcctcaaccgacgcgaattgcgagtaacctttcaccttacccggcgtattggtacaacgccctttcgtgcacttcatgccgaacaggttattgttgctacgcgccagtttagaggttccccagccgctttccgccgccgccatcgtcgccaccatgctggttgggataatgtcgacgcgctccagcaacgtattccacggaatacgacgcgtgttgccggaccagctcactttatagcgcttcgcgatatctttcatacgcgcgcgttcagacggcgaccagcggttctggtactgttttgagatcagccaattacggtccgcggtaatcgcggcattttggctggtgatgtaaggcataacggtccggagaaacgctttttttctgggggttccggaagggtattttcgcaaatcaggaagtgaactgctctttgcactattgcgagaatactcttgtttactgctaacctgtttataacttgtctcagttatgtgggacttttgactcgtttgtgttgcgtgcgtctttgccagcacctcacccgaaaatgcgatggtgagtaacataagaatcattgccccatatcgtcgcatgggagtcaatatcattaggtctcctggtcggattgatacattccaacaccttttatttttcacgaagttgaggtttgaaccccaaattctagcaaaaataggcttaaaaagcacctcagggaatagtcttaatccgaaactatgtcaagtattaacgataacaggcagcaataatgccaataaaatgtggtgcttatcgcaaatagaggcgtttttttgcgcctcgtcgctcaccctcgcgtctcctcctgcgcgactctctgctgaggaggagttcattcgcctaaaaaccaggcaagctgatgaatattgcccacaaaggatagcgtgatgaaacttgccgccttcgctctgacgctgatacccggtatcgcgatcgcctcatcatggacctcacccggttttccgacgttctcgacgcaggaaaccgggcgctttaccagccatgctgcattaacaaaaggtacacgcgcgttaacgctccatattgaccagcagtgctggcagccctccggcgccataaaactcaaccaaatgttgtcgttaaaaccctgcgaaggcgcgccgccgcaatggcgtttgtttaaagatggcgactatacgataacggtagatacccgctccggtacgccgaccctgttgttatcgataaaaactgaacctgaacgcaccgcgcagctcgcctaccagtgtcccgtctgggatgggtcgccgctcacgctggatgttcgccaaacctttccggaagggacggtagtgcgcgattattacagtggtcaaaccgataccgtccaaaacgggcaaatcacgctgcaacctgccgacagccacgggcttttattgctggaacgcgcggaaacccatgcgccggcgccttttaactggcgcaacgccaccgtttattttgtgcttacggatcgctttcgcaatggcgatccaaccaacgaccacagctatagtcgccataaggatggtatgcaagagattggcactttccacggcggcgatttgcgcgggttgacgagtcaactggactatctacagcaattaggcgtgaacgccttgtggataagctcgccgtttgaacagatccacggctgggtcggcggcgggacaaaaggcgattttcctcattacgcctatcacggctattacactcaggactggacgacgctggatgccaatatgggcagcgaagccgatctccgcgcgctggtcgacggcgcgcaccagcgcggcatccgtattttatttgacgtagtaatgaatcatgccggttacgccacgctggcggatatgcaggagtatcagttcggcgcgctctatttatccggcgcggaacggcaaaaaattctcggcgatcgctggacaaactggcgacccgccgccggacaaagctggcacagctttaacgactacatcaacttcagcgacagcgccgcctgggaaaaatggtgggggaaaaagtggattcgtaccgatattggcgactacgacagtccgggatttgacgatttaaccctgtcgctggccttcctgccggatataaaaacggaatctaccacgccttccggtctacccgcgttctatgccaacaaacccgatactaaagcaaagttcattgagggctatacgccacgggattatctgactcactggttaagccagtgggtacatgattacggcattgacgggttccgggtcgatactgccaaaaacgttgagcttcctgcctggcaacagctaaaaacccaggccagcgcggcgttacgtgaatggaagcaggccaatccggacaaagcgctggataatagcccgttctggatgactggcgaagcgtggggccacggcgtcatgaaaagtgattattatcgctatggtttcgacgcgatgatcaattttgattatcaggagcaggcggcgaaagcggtcgattgcctggcggaaatggggccagtctggcagcagatgacggataaaatgcaggatttcaacgtattaagttacctctcctcgcatgatacgcgccttttccgtgagggcggtgataaggcggcggaactgctgctgctttcgccaggcgcggtgcagatcttttacggcgatgaatccgctcgtcccttcggccccaccggctccgacccgctgcaaggcacccgttcagatatgaactggcaggacgtgagcggaaagtcagccgcagccgtcgcgcactggcagcgtattagccagttccgcgccagacatcccgccatcggcgcaggccaacaaaccacgctgacgctaaaacacgggtacggttttgtacgccagtacggcgacgatacggtgatggtcgtctgggcgggccgccgctaatcgtggcgctaccggtctcctcgcgtaccggtagccccttcaaaacaaaaaactaacctgataaaaatttgtagcataaaacatcaacaccaccgcctgacccccatttgcgccccgccatttgtagcgttatggttatccactttgacagacagttcgatagatcacccgttatgacattttcacttttcggcgataaatttacccgccattcaggcattacccgcctgatggaggatctcaacgacggcttacgcacgccaggcgccatcatgcttggcggcggtaacccggcacacatccctgcaatgcaggattatttccagacgctactgacagatatggtagaaagcggcaaagccgctgatgcgctttgtaattatgacggtccccagggaaaaacggcgctactgaatgcactggccgtactgctacgtgaaacgctgggatgggatatcgaaccacagaatattgcgctgacaaatggcagtcagagcgcgtttttctacttatttaatctcttcgccggacgtcgcgccgacggcagtacgaaaaaggtactattcccgcttgcgccggaatacatcggctatgcagattccggtctggaagacgacctcttcgtttcggcgcggccgaatattgaactgctgccggaaggccagtttaagtatcacgtcgattttgagcatctgcacatcggcgaagaaacggggatgatttgcgtctcgcgcccaaccaacccaaccggtaacgttatcaccgacgaagagctgatgaagctggacagactggcgaatcagcacaacatcccactggtgattgataacgcttacggtgtaccgtttccgggcattatctttagcgaggcgcgcccgctgtggaaccccaatattatcctatgcatgagcctctcgaagctggggctgcccggttcccgctgcgggattatcatcgccaatgataagacgattaccgccattgccaacatgaacggcatcatcagccttgcgcccgggggcatgggcccggcgatgatgtgcgaaatgattaagcgtaacgatctgctgcggctgtcggaaacggttatcaaacctttctactatcagcgcgttcaacagacgatcgcgatcattcgtcgctatttatccgaagaacgctgcctgattcataaaccagaaggcgcaatatttttgtggctgtggtttaaagatctgccgattaccaccgagttactctatcaacgcttgaaagcgcgcggcgtgctgatggtgccgggccactatttctttcccggactggataaaccctggccgcacacacaccagtgtatgcggatgaactacgtgcctgaaccggacaaaatcgaggcgggcgtaaaaattctggcagaagagatagaacgcgcctggcgtgaaggctgacggttattccggccatcatgcaggccggaacgacgttcagaaaggttgagaatagaggcgctggcgctgcacgtgtgctgcgtcaacgcactgtaacgcactggtcgggcaggcttccacgcacgccggccccgcttcccgatgccagcaaagatcgcatttaatcgcctgcgcgcctgacgcggacgccaccacagtcatcgcgccaaacgggcaagccagcatacagcttttacaaccaatgcagcgcgatgacgtcacgaagatatgcccccgatcacggcgaatcgcctgtaccgggcagacatttgcgcacggcgcgtcctcacactgatggcagaccgtggccgtggtgaagctatcctcttttatcacccggatacgcggcacaaagtccgccgtcgtcaccgccgcgctattctgctgttcctggtgcgacaccacgcaggcgacctcgcaggtacgacacccgatacacgccgacgcatccgccataataaaccggttcattgttctccccctgcgttaaaacgccagaatgccagagagccattccccgccgctttgatcccactacgcaaacggacaaattttgtcagatgcctgataaaacctggcgagctgtcttattcgcgaacggtaaatcccagctcgttagagatagcctgtgcggtttcacgcaacggtttgagcagatttttctcgccgatctgttttagccgtgacgtcgacagtgaaatagaaatggcgtaaggcactcgatggtgaatatcaaacacaggcacagcaatacaggaaacgcctagttcattttcttcgcgatccatcgccatgctggtttcacgaatttgcgccagctcatcgtacattgctggtaaatcggtaatggtattacgagtcagcggctggatctgatctttatggctttcccagtaagacgccacataatccggctgaccaaacgccatataaattttccccatcgccgagcagtacagcggcatatgctggccaatgtaggcacgcgtgcgcagcataccggtggtcggttccagcttataaatcaggatagcgtggtcatcttcacggctggaaaaattcaccgtctcgccggtggtcaggttgagcgcctcaaggtgcggtgccgcaacgtggatgatattcagcgatgacagggctttttggccgacggcaataaactttgtcgtcagacggtagctcccggccgccggcgctggcgtcacatatccgcaggattgaagcccctgcaacaaacgatggacggtactcttgttcagccccgccagctccgacaggtgcgccagcgggcaaccgttcgggtagttactcaaaatttctatcaacatcaggccacgaaacaggctctgactccccgcaggcttctctttatcgttgttctggctcatcagaaaactctctcctttcttgggcgatcagatggtagctcaaagtgtgttgcagttcacgatatcagcataaaaaacataacccgatgattttaatcatttttaaaaaccttctctggcgttgccatgtcaatttttgatctatatatttggaactagatttcgcattatgaaatttatagacaaaaaaacatactaaaatttctaacaatcgaccaggagaacagggatgaaagtaactttcgaagagttaaaaggggccttctaccgcgtcttgcggtcgcggaatattgcggaagataccgccgacgagtgcgcggaaatgttcgctcgcaccaccgagtccggtgtctattcccacggcgtgaaccgctttcctcgcttcatccagcaactggataacggcgacattattcctgatgctaaaccgcagcgggttaccagcctcggcgccatcgaacagtgggatgctcagcgcgctatcggcaacctgacggcgaaaaagatgatggaccgggccatcgagctggcttccgatcatggtattggcctggtggcgttacgtaatgctaaccactggatgcgcggcggcagctacggctggcaggcggcggaaaaaggctatatcggcatttgctggaccaactccatcgccgtcatgccgccgtggggggcgaaagagtgccgtatcggtaccaatccgctgatcgtcgccatcccgtctacgccgatcacgatggtagatatgtcgatgtcgatgttctcctacggaatgttagaagttaaccgtctggcgggccgcgaactgccggtggacggcggtttcgacgataacggtcagttgaccaaagaaccgggcgttatcgagaaaaatcgccgcattttaccgatgggttactggaaaggatctggtctgtcgattgtgctggacatgattgccaccctgctttccaacggctcttccgttgccgaagtgacccaggaaaacagcgatgaatatggcgtctcgcagattttcatcgccatagaagtggataagctgatcgatggcgcaacccgcgacgccaaactgcagcggattatggatttcatcaccaccgctgaacgcgccgacgacaacgtcgcgattcggctgcccggccacgaatttaccaaactgctggatgacaaccgccgtcacggtatcaccattgacgacagcgtctgggctaaaattcaggcgctgtaaggagccacatcatgatttttggacatatcgcgcagcctgatccgtgccggttaccgtcggccatagagcaggcgctcgatttcctgcgtaatacggactttcgcacgctggaacctggcgtagtggaaatcgacggcaaaaatatcttcgcgcagattatcgatatgaccacccgcgatgctgctgaaaatcgtccggaagtccatcgccgctatctggatattcagtttctggcatggggtgaagagaaaattggggttgccattgataccggtaataatcaaatcagcgagtcattattagaacagcgcgatattattttttatcacgacagtgaacatgaatcattcattgaaatgataccgggaagttatgccctgtttttcccgcaggatgttcatcgtccaggttgtaataaaagcattgctacgccgatacggaaaatagtcgtaaaagtcgccatagacgttttataaaatagagtttactggagcacaaaatgaaaaataataccggttatattatcggtgcgtacccttgtgcaccctcatttcaccagaagagtgaagaggaagagacggaattctggcggcaactctctgatactccggatatccgggggctggagcagccttgtcttgaacatcttcacccgctcggcgacgagtggttattgcgccatacaccagggaactggcaaatcgtggtcaccgcgataatggaaaccatgcgccgccgtagcgaaaacggcggttttggattagcgtccagtgacgaggaacagcgtaaagcctgcgtggaatactaccgtcatctttatcagaagatcaataaaatcaatgggaacaataccggcaaagtcatagcccttgagcttcatgccgccccgctggcgggcaatccgaacgtggcgcaggcaaccgacgcctttgcgcgctcattaaaagagattgccaactgggactggtcctgcgacctggtgcttgaacactgcgacgcgatgaccggccccgcaccgcgcaaaggattcttaccgttggtaaacgtactggaaactattgccgactatgacataagcgtctgcattaactgggcgcgctcggctattgaagggcgggatacctctctaccgctgatccacacgcagcaggccaaacaggctggaaaactcggggcactgatgttctccggtacaacgctggatggagaatacggcgaatggcaggacctccatgctccgtttgcacctttctgtccacaaagtctgatgacggagaaacatgttaaagaactgattaccgccgccgctcccgaactgttgcagtttaccggtattaaattgttggaaatcaatgccagtgccgatattaatcaccgcataaatatattacgcgatggtattaacatgatgaaaaaggccacacgccgctaacctgaattaaacatcatcaccttaattctcggcctgcaactcaacgttgcgccgacctaatataaaccaaacataagaaattaagttccactattcagcatcgaaagaaataagtttctataacctgatggagtcgttatgaagcgggtacttgagggcatacttgcggtattaattgccgtactttcctgcattgtatttattaacgttattttacgttacggttttgagagcagtattttgtcggtagatgaactatcacgttatctatttgtatggctgacgtttattggcgccatcgttgcatttatggataacgctcacgttcaggtcacttttgtggtggaaaaactttcgccagcgaatcagcgtcgtctctcgctgctgacgcattcgctgattttattgttatgcatcgcattaggctggggcagcctgcaaaaagcgttgcaggactggagcgatcactcgccaatcctcggtttaccgatcggcctgatgtatatcgcctgtctgcccacaagcgttgccatcgcgttaatcgagctgcgtcggctttatcacttaataacgcgtaacgattcctttcaacaaccacagcaaggagcctaatcatggccgtggtgatatttctctgctgcctgctcggcgggatcgcgataggtttacccatcgcctggtcgctgctgctttgcggcgctgctctgatggcatacctggatatgtttgacgtgcagattatggcgcaaaccctggttaacggcgcggacagtttctccctactggccattcccttttttgttttggccggtgaaatcatgaacgcgggcggcctgtcaaagcgaattgtcgacctgccgatgaagctggtcggccataagcccggcggcctgggctacgtgggcgttattgcggcaatgattatggccagcctttccggctctgcggtagcagataccgctgcggtcgccgcgctgctggtgccgatgatgcgctccgcaaactacccgatcaaccgctccgttgggttaatcgcttccggcgggatcattgcgccaattattcccccctcgattccttttattatcttcggcgtttccagcggcttgtcgatcagcaagctgtttatggccgggatcgcaccgggcatcatgatgggcgcggcgcttatgctcacctggtggtggcaggccgggcgattaaatctcccttctcagcctaaagcaacaccgcgtgaaatctggcaatcattggtttcaggtatctgggcgctgtttttaccggtgattatcatcggcggcttccgttccggacttttcacgccaacggaggcaggggcggtcgccgcgttttacgccctctttgtcgccgtggttatctatcgggaattaacgttttccagtctctaccacgtgctggtcaatgccgccaaaacgacgtcagtcgtcatgtttctggtggctgcggcccaggtatccgcctggctgattacgatcgcggaattacccatgatggtgtcagatttgctgcagccgctggtcgactctccgcgactcttatttatcgtcattatgatctcaattatggtcgtcggtatggtgatggatttgacgccaacggtgttaattcttacccctgtattattgccattagttaaagaagccaatattgacccgatttatttcggcgtcatgttcattattaactgctctattggattaatcacaccgcccgttggcaacgtcctcaacgttatttccggggtagcaaaattgaaatttgatgacgcggtaagaggcgtattcccttacgttgtcgtcctgatgtcgctgctggttttatttatttttattcccgagctaattatcacaccgcttaaatggattaattaaaggataatattatgaaattacacgttattgctcgttcattattgatagctggtctgacggttttcagcgtgtcgtctctggcggcgcaatctttacgttttggttatgaaacaccgcaaactgactcccaacatattgccgcgaaaaaatttaacgaactattaaaagaaaaaactaacggcgaattaacgctaaaactctttcctgacagcacattaggtaacgcccaggcaatgatcagcggggtgcgcggcggaaccattgatatggaaatgtccggttcgaacaatttcaccggcctggcccctgtattcaacttacttgatgtccccttcctgtttcgcgataccgcgcatgcgcataaaacgctcgacggcaaagtcggcgatgaactgaaaaaatcactcgattcaaaagggttaaaagtgctggcctactgggaaaacggctggcgcgacgtcaccaactcccgcgcgccggtaaaaacgccgggcgatttgaaaggcttaaaaatccgcactaacaacagcccaatgaatatcgcggcctttaaaatcttcggcgcgaaccctattccgatgccattctccgaagtctataccggcctcgaaacccgtacgattgatgcccaggaacaccctatcaacgtcgtgtggtcagcgaaattctatgaggtacagaaatacctctccctcactcatcacgcctattcgcctctgctgctggtgatcaataaagccaaattcgacgctttaagcccgcagttccaggaggcactgctgagttccgccaaagaagcgggtgactatcagcgcaaactggtcgccgaagatcagcaaaaaattatcgatggcatgaaagaagccgaagttgaagtcctgaccgatatcgaccgtaaagccttcagcgatgcgctgggcagccaggtgcgcgatatgttcctgaaagacaacccgcagggcgccgatctcctgaaagccgtggacgaggtgcaataagtcatgagcaactactggctggggttagattgtggtgggagttggctaaaagccgggttgtacgatggcgcaggccgggaagtagcggtgcaacgcctgccgctgcacgctttaagcccgcagccaggctgggttgaacgcgatatgaccgagctgtggcaacagtgcgcctcggtcatcagcaaactgctggcgcacacgggggtgagcggctcacaaatccgcggtctgggtatttccgctcagggtaagggcctgttcctgttagataaaagcgatcggccattaggtaaagcgatactctcttccgaccgtcgcgccatggaaattgtccagcgctggcaaaaagaagcggttccgcaaaaactctacccgctgacccggcaaaccctgtggaccgggcatccagtctcccttttacgctgggtaaaagagaatgagccgcagcgctacgcgcagataggctgcgtcatgatgacgcatgactatctgcgctggtgcttaaccggcgtgaaaggctgtgaggagagcaacatctccgagtccaacctctacaacatggcgacgggccagtacgacccgcgtctgaccgagtggctgggcatcagtgaaatcgacagcgcgctgtcccccgtggtgggttcagccgaaatatgcggggagatcaccgctcaggcagccgccatcaccggtctggcggcgggtacccccgtcgtcggcggcctgtttgatgtggtttccaccgccctttgcgccggtattgaggatgaatcgaccctcaatgcggtgatgggcacctgggccgtcaccagcggcatcgctcacggcctgcgcgaccatgaggcccacccttacgtctatggccgctacgtcaatgacgggcagtatatcgttcacgaagccagcccgacctcctccggcaaccttgaatggtttaccgcccagtggggcgacctctcttttgacgagatcaatcaggcggtcgccagcctgccgaaagccggtagcgaccttttttttctgccgtttctctacggcagcaatgccggactggagatgacctgcggtttttacggcatgcaggcgctgcacaaccgcgcgcacctgctacaggcgctctatgaaggcgtggtcttcagccatatgacccacctcaaccgcatgcgtgaacgctttaccgaggtttgcgccctgcgcgttaccggcggcccggcccactccgacgtctggatgcagatgctggcggacgtcagcggtttacgcattgagctgccgcaggtggaggagaccggctgcttcggcgcggcgctggctgcccgcgtcggcaccggcgtatatcgcgatttccgcgaggcccaacgcgacctgcagcacccggtgcgcacgctgctgccggacatgaccgcgcacgccctctaccagcgcaaataccgccaataccaggatttgattgaagcactacagggctatcacgcccgtattaaggagcacgcattatgagccgaccattactgcaactggcgctcgaccacaccagtctggaagcagcccaacgcgatgtcgccctgctacaggatcatgtcgatatcgttgaggccggaaccatcctttgtttaaccgaaggccttagcgcggtgaaagccctgcgagcgcagtgcccggaaaaaatcatcgtcgccgactggaaagtggccgatgccggtgaaaccctggcgcagcaggcttttggcgctggcgctaactggatgactatcatctgcgccgcgccgctcgcgaccgtcgagaaaggccatgccgtcgcgcaatcctgcggcggtgaaattcaaatggagctgttcggcaactggacgctggacgacgcccgagactggtatcgcaccggcgtgcgtcaggcgatttatcatcgcggacgcgatgcgcaggccagcgggcaacagtggggagaagcggacctggcacgcatgaaggcgttgtccgacatcggccttgaactatcgattaccggcggcattaccccagcggatctgccgctgttccgcgacattaacgttaaggcatttatcgccggacgtgcgctggcaggtgccgcccatccggcgcaggtcgccgccgaattccacgcccaaattgacgccatttggggagaaaagcatgcgtaatcatccattaggtatttacgagaaagcactggcgaaagacctcagttggccagagcggctggtgctggcaaaaagctgcggttttgattttgtcgagatgtcggtggatgaaaccgacgaacgcctttctcgcctggagtggacgccagcccaacgcgcatcgctggtgaacgcgatgctggaaagcggcgtcgctatcccgtcaatgtgtctctccgcccatcgccgtttcccttttggcagccgcgacgaagcggtacgccagcgggcgcgtgaaatcatgaccaaagccattcgcctggcgcgcgacctggggatccgcaccatccagttggcaggttacgacgtctattacgaagagcacgacgaaggcacccagcaacgtttcgccgaagggctggcgtgggcggtggaacaggccgcagcggcgcaggtgatgctggcggtggagatcatggataccgcgtttatgaactccatcagcaagtggaaaaagtgggacgagatgctttcgtcaccgtggttcaccgtttatccagacgtcggcaacctcagcgcctgggggaacgacgtgaccgccgagctgaagctgggtattgaccgtatcgccgctatccacctgaaagacacgctgccggtgaccggtgacagccccggccagttccgcgacgtgccgtttggcgaaggatgcgttgattttgtcggcatcttcaaaacgctgcatgagctgaattatcgcggttcatttctgattgagatgtggacagagaaagccagcgagccggtgctggaaattatccaggcccgacgctggattgaatcacggatgcaggaaggaggtttcacatgttagagcaactgaaagccgaggtgctggcggccaacctggccctcccggcgcacgggctggtcacctttacctggggcaacgtcagcgcggtcgatgagacgcgcaaactgatggtcatcaagccttccggcgttgaatatgaggtgatgaccgccgacgatatggtggtggtagagatcgccagcggtaaggtcgttgaaggccataaaaaaccgtcgtccgataccgcgacccatctggcgctctatcgccgctatccgcagatcggtgggatcgtgcatacccattcccgccatgcgacgatctggtcgcaggccgggctcgatctgcccgcctggggcaccacccacgccgactatttctatggcgcgatcccctgtacccggctgatgaccgttgaggaaattaacggcgagtacgagtatcagaccggcgaggtgattattaaaacctttgaagagcgcggtctcgatccggcgcaaatcccggcggtattggttcattcgcacggcccgtttgcctggggtaaaaatgccgccgatgccgtccacaacgccgtggtgcttgaggagtgtgcctatatggggctgttctcgcgccagctggccccgcagctaccggatatgcagcctgaactgctcgataaacactatctgcgtaaacacggcgcgaatgcctattacgggcagtaatgccggcagccacagcctgtgtcagatggcggctgcgccttatccgacctacaagatttgcaatatcaatacgttgtgatgaactcttgtaggcccgataagcaaagcgccatcgggcattcagtttgcaaccgctttgtcagagggccaaagattatactcaagaattaacgtgttccttactgtagcgccgcttccaggcggtaggcgtcaggccggtgtgcttgcggaagatctggcgaaagtaaccaacgtcattaaaaccgcaccgttccgccacctcttttaacgaacgcgcgtcgctaatcagcaacttttccgcctcgcgcacccgctggcggtggatggcttccgttagcgtaaggtgaaatacccgccgataaacgcgtcccagataatccacattgcaatgcagttctttcgccagaaccgcgctggaaagcggcaggtgatagtgcgttcgaatcagctgctgcgctttccaggccagcgacacgccagcggcctcggcgttttcattctgccgggcgtcaacggtgagctgctgcaaaatcagcagcacgatgaactccagcgccgggctgcgctggtgcttttcctgctcgttcataaactggcgaaaaagcgcaatcagcgcctgcggatcggcaacctgggtatgctgcggcacggaaagatgcgtcagccagcgcgggtcgctgtccggcgctttgacctcaaaatggagccagtaaaatttaagatcggcgggaaactcctcaacgccaatatggcggcgatgcggccaaagcaacaggctttccccggcttcgacacagaaaacacattcttcttcctgaattttcaggcagcctttttccacaaatataatttcccacgattgcagacgcctggctggatgacgcccaataccgcgagaaataaataatccgccgttttggactttaatcggtaatgttatggataattcgagcattaatatgtcatttcccgctcattcagcaccgtatttcatattagcttttgattattaactaaaaatagtcatttcactcgatccatctcacatttttaaatgcgggtcggaatcgtcatctttttttactcttttatcgccttgtcgctcaccgctatctgggcaaaatgaatcaggtcataacgcgaaaataaaaattactgccataaaataccccgtcagcgaggaatatctatgacctctacagccttaaggagcacgaaatgaacgtactggaagtcgatctgcataaactgacggtcagcgatccgttcctcggacagtatcaacaactggttcgcgatgtggttattccttaccagtgggatgcgttaaacgatcgtattccagaggctgaacccagccatgccattgaaaatttccgcattgccgcaggccagcagacgggcgacttttacggcatggtctttcaggacagcgacgtggcgaaatggctggaagcggttgcctggtcactgtgccagaagcccgatccagcgcttgagaaaaccgccgatgaggtgattgaactggtggccgccgcgcagtgtgacgatggctatctcaatacgtactttacggcaaaagccccgcaagaacgctggagcaacctggcggagtgccatgagctttattgcgccgggcatctgattgaagcgggcgtcgccttctttcaggccaccggcaagcgtcggctgctagacgtcgtttgtcgcctggccgatcatatcgacagcactttcggccctggcgaaaatcagctgcacggctatccgggccacccggaaattgagctggcgctgatgcgtctgtatgaggtaacagagcagccgcgctatatgacgctggcaagctactttatcgggcagcgcggcgcccaaccgcacttctacgacgaagagtacgaaaaacgcggccaaacctcttactggcatacctacggcccggcgtggatggtcaaagacaaagcctacagccaggcgcatctgccaatttcgcagcagcagacggcaatcggccacgcggtacgttttgtctatctgatgactggcgtggcgcatctcgctcgcctgagcaacgatgaaggcaaacgccaggactgcctgcgtctgtggaaaaatatggcgcagcgtcagctgtatatcaccggaggcatcggttcccagagcagcggcgaagcctttagcagcgattacgatttaccgaatgattcggtctatgcggaaagttgcgcttcaatcggcctgatgatgttcgcccgccggatgctggaaatggaagccgatagccagtacgccgacgtgatggagcgcgcgctgtacaacaccgtcctcggtggtatggcgctggatggcaagcatttcttctacgtcaacccgctggaagtgcatccaaaatcgttaaaattcaaccatatttacgatcacgttaagcccatccgccggcgctggtttggctgcgcctgctgcccgccgaacatcgcccgcgtgctcacctcccttggtcactacatctacacgccgcgtgcggatgcgctgtacatcaatatgtacgtgggtaacagcatggaaataccggttgaaaatggcgcgctcaaactgcgaatcagcgggaactacccgtggcatgagcaggtgaagatcgccatcgactctgtgcagccggtacgtcacacgctggcgctacgtctgccggactggtgccctgaggcaaaagtgacgctcaacgggctggatgtggagcaggatattcgcaaaggttatctgcatatccgtcgaacctggcaggagggcgatacgataaccctgacgctgccgatgccggttcgccgcgtgtatggcaatccgctggcgcgtcacgtcgccggtaaggttgccattcagcgcgggccgctggtctattgccttgagcaggccgataacggcgaagagctgcataatctgtggctaccgaaagagagtgagttccgggtctttgagggcaaagggctttttgcgcataagatgctgattcaggctgaaggcgagaagcaaagcgccccagatgcgcagcatcaggcgttgtggcactacgataacgcgccgtcatcgcgccagccgcagacgctaaccttcattccgtggtttagctgggccaaccgtggcgagggcgaaatgcggatttgggttaacgagcggtaatactgtgccggatggcggctgcgccttatccggcctacaatatttgcaatatcagtatattgcgataaattcttgtaggcccgataagcgaagcgccatcgggcattacctcttgcgtcagaacagccccagaggcttatcggaatagctcaccagcaggcacttggtttgctggtagtgttccagcatcatcttatgcgtttcgcgcccgatgcccgactgcttatagccgccgaacgcagcatgtgccggataggcgtgatagcagttggtccatacgcgcccggcctgaatgccgcgccccatcttataggccagattgccgttgcggctccagacgccggcgccgaggccatactgcgtatcgttagcgatttccagcgcctcctccatggttttaaaggtggttaccgccagcactgggccaaagatctcctcctgaaagacgcgcatattgttcttaccaaacagaatggtaggctcaaggtaatagccctctttaagttcgccatccagctccttgcgtcgcccaccggtcagaatatcggccccctcttttttaccgatatcgatataattgaggatagtctcaagctggccgtgggagacctgcgcccccatctgtgtaccgctatctagcgggttcccgctgcgaatgctctccacccggcgaatagcgcgttccataaagcgctcatagatggactcctggaccagcgcacggcttggacaggtacacacctcgccctggttaaaggcaaacagggcaaatccctccagcgctttatcaaagaacgcatcttcctcatccatcacgtcagcaaagaagatattgggcgatttaccgcctaactccagcgtcaccggaataatgttctgcgtggcgtactgcatgatctgttgacccacttccgtcgaaccggtaaacgccaccttcgcgatacgtttcgaggtcgccagatattcgccaatctcgccgcccgcgccgttcacgacgttgacgacgcccggcggtaacagatcgccaatgatttccatcaacagcaaaacggaaagcggcgtcaggcgtgccggtttaagcaccacgcagttacccgccgccagcgctggcgccattttccagcttgccatcaacaacggaaagttccacgggattatctgccccacgacgccaagcggttcgtgaaaatggtaggccacggtttcgctatcaacttcgctaatcccgccctcctgcgcacgtatacaggaggcgaaatagcggaaatgatcgatcgccagcggtacgtcggcggcgctggtttcacgaatcggtttaccgttatcccaggtttccgctgtcgccaacagttcgaggttttgttccatccgatcggcgatcttaaacaagatagcggcacggtcttgtactgacgtatgcgcccacttatctttcgccttatgcgcggcgtcgagcgctaaatcgatatcttttttaccggaggaagcgacttcacatagcggctggccggtcactggcgtcaggttttgataatattcgccgtcggcgggcgcaacccagtcaccaccaataaaattgtcatagcgggcttttaacttcagtgggtacccgtattcacctggctgaatacgtgttgaagggggattgttcgtcatgaccaactccttattgtaaaggtactccacaagggtagacggtgctggtgaatttttcgccaatgatttcccgctttacgacagcaatcacgaattactttcctttacgtttctccgtctggttttagccatactaaacaggtgcctgtttaacgtacggagaacactatgcagcaatatatcggtattgatgtgggaggaactcacgtcaaatatggcgtgattaacagtgacggcgaagaattaacccatcatcaattcgatacgccagaggacgcctccacgtttacccgcaaatggcaggatgtggtggcgcgttgccaacaggactatgacattgcggcaatcggggtcagtttccctggccatattaatccccataacggtcatgcggcaaaagcgggcgcgctggcttacctggatgacgtcaacctgatggagttgttcagcgggctgaccgatctgccgctggtcgtggagaacgacgcgaactgtgcggcgctgggcgaaatgtggcgaggtgccgggcagcattatgaaaacatggtctgcattaccattggaaccggcattggcggcggtattatcgtcggacgagaactgtatcgcggcgcgcattttcacgccggtgaattcggcgtcatgccggtcgggaacaatggcgaaagtatgcataaaatcgcgtcaaccagcggattaatggcgtcgtgccgccaggcgctggcgctgcctgccgaagagatgccgcctgcggatgtgatcttcgaacgaatggcgaccgatgttcatctgcgtgaggcggtcaatgactgggcgcgttatctttcacgcggcgtttacagcgtgatctctatgtttgatccgggcgtggtgctgatcggcggaggaataagcgaacaggaaaagctctacccgctcctgacgcggcatcttgaaacgtttgaaatgtgggaggcgctccaggtgccgattcagccctgccaactgggaaatcaggcgggcaggctgggcgccgtctggctggcgcagcaaaagctcgaccgaggctaacgtgttacgccttatccggcctgcattgtctacgcaggcccggtaagcgtccgcgccaccgggcaaaggcgttacatcgccgtgcgataaagttccacaatctcatcgtgagtcgcctgaataaggcgcaaagaatacgggtgaaattatcctgataacaggttcacgctggctattttaagaagccagaaaaataaaaagcacatctggttcatttcctgatgtgctttttataaagcaacgcaataattgtattgcttcatttgttatttaatttaaccatttcattctttttgcggaaataataacgcatcacgtaataaatgatcattcccacgacgtcgtgtaaatccaatccggtcaaaatattcaaggatctgaatggccagtttccgccctacattcagcctgtcgcgaaaatccgccgcacaggttgatcctctctcttgatccagctcgcggatcatattggcgaaagcgacaatccgatcgttacgatagtaccgatcttttacgatcgcggtaatgatgccttgctgtgccgcctgccgcagcaccagccgcatcaattgttcttccgttccggtctctttcgccagatcgcgtacccaccagggttcatcgccaaatagcggttcgactttttgccagacggcctgctgctcatcgctaaatcccgctttatgatccggcagatgcaaccaaccgtgatggctatgaatcaggccgtcgtcgcgcatccgctcgatcagcatcagaaccagcgcttcatcctccatcggcagggccatgcggcgtaaacgctcgcgtcccggccccggttcatcgcggtgctgttcgtggtaggtcgccagcgtatcaagaatcttacgctgccagcgggcggcgacgggcgcgcttaacaaattgtctccagcctggataaaaccatgttgctcaataagctgacgcataccgagaggattaagctgacgcgcccaaccgaaatccggcaggttgacggcgccgcgttccagatgaatggccaacgccgcgctatcgtcctgcgcggcggcaagcgttgaaagccagtgcaaataatctggcttacgtttaccgcgacgcggcgccttaagcgtcaccacgcgtgcgccggcaagggtggcacgtgcggaaatatcacgcagcaccagtctgtcattatcggccagccacaacggcgtatcaaagatcagctcggccagcccgccttccagcaaagagacgcgaccggtcacatggctggcagcatggtgaatatgtagcggttgccattgggaaagcggcgcatgaagcgccagagaaacgatcacccgggaaaaagcctcccccaccggcgcatcggaaagcagccagtcgccgcggttaagctgctccttctccgcatcgcccgcaatattgagcgcaatacgttgcccggcatacgcatggtcagtgggctgattttgcgcgtgtagacttcgtacgcgcatcggcgtattaacgccggtcaaccatagcgtatcgcccacgtttacctctccgctcagcgccgttccggtcaccaccagtcccgcccctttcaccgtaaacgcacggtcgatagccaggcggaagcgatgctgcgcggcgtgcgaacgtgcaggaagctgctgtaaatgagcgcgaagttctgcaataccgcgtccttcattggcggcggtgacaaataaaacggtatcggcgaagccatagttgtcgagcgccgccagtacctcttcacgtacttcaccgatacgcgcctcgtccacgcgatcggctttggtcagcgcgacggtgagctggagattacccgtcagttgtaggatctgtaaatgctcgcgcgtttgcgccatgacgccgtcatcacaggcgaccaccagcaaagcgtgatcgataccgcctacgcccgccagcatgttagagaggaatttttcatgcccaggcacatcgataaagcccagcacacgaccatccggctgcggccaataggcgtagcccagatcgatagtcatcccgcgttttttctcttccggcaggcgatcggcattgaccccggtaatcgcctggagcaacgtcgttttaccgtggtctacgtgtccggcagttgcaataatcatttcagcatcatctccataaaccggctttcgtcttcaagacagcgcatatccagccataaacggccatcataaattcggccaatgaccggtacaggcagcatgcgccagcgggccgccagcgcctccagccgactaccgcgcccgtcgtgcggggtaaaggtcatggcggcgctgggaaggcggtctaccggtaatgaaccgctgccgatttgcgacaggcagggtttaacctccagcgcaaattcatcgccgtaacgtgccgccagccgcgcctgtaaccgctgcgcttgttcgcgaatcgacgcttcgctgcgggttaacagacgcagcgtgggtaatttctccgccaacgcttccgggtgcagatacagacgtaacgttgcctccagcgccgccagcgtcattttatccgcacgcagggcgcgtttcagcggatggctttgcagttgggcaatcatcgcttttttgccgacgatgatcccggcctgcggcccgcccagcaacttatcgccggagaagcttaccaggctgacgcctgcggcaatgagctgctgcggcatcggctctttgggtaagccatattgacttaaatccaccagcgaaccgctgcccagatccgccaccaccggaatatccagctctcgcccgatttccgccagttccgcttcctctaccgttttggtaaagccctcaatgctgtaattactggtatgcaccttcatcaacagcccggtattttcatttaccgcctgacggtaatctttcgcgtgcgtccggttggtggtgcctacttcatgcagcgtacagcccgcctggcgcataacatccggaatacgaaacgcgccgccgatttcgaccagctcgccacgcgaaaccaccacctctttgccgctggcggtcgctgccagcatcagcaataccgccgccgcattgttattgacgatacaggcgtcctccgccccggtgatacggcataacagcgtcgccaatgcccggtcgcgatgcccccgcccggcgccatccaaatcgtattccagcgtcaccggcgcgcgcatcgcctgcgttaccgcctcaatcgcttcttgcgcctgcaatgcgcggccaagattggtgtgcaacaccgtccccgtcaggttaatcaccgggcgcagcgcgctttgcgccgcattttccagccggagtttcgcctcttgcgcccagtctgcgtaccagtcgggaagcgtttgcgtattccggatgacgtcgcgcgcgtcgtcaagcatccgcctaagcagatcaaccacctgggtatggccataccgatcgcgcagagaaagaaaggcgctatcgtgcaataaacgatcgatagcaggaagctggctgtagagtgtacgcgtttcgcttgtcatgaaaatgcctggctgttggtggccctctcctggcgggagagggatatcgacataagggggattgtaacgtgagtttgctcaggcggacataatgcgcgtcaagcctttggcgcttcggtgcgggcaaagctttcgcgttgaaaaagcgtttcgaccagtttgaccaggtgggggcggctaacacaccagccaggcgcgacccggcggaagttgagatagcctaccgcacaggcaatcgcgatagtcgccagattgaccgtatccgtttttagcgtcccgtcgctcagataactttcgagcatatccaggctgcggttgattttttcccgctggcgcagcagttccgtttccgattgttgcgccgtcgggcgcgcctgttcgcgtacagacaccaacgctgcatccataatgccgtcagccaacgcttcaagctggcgaactttaagcgctgccatcgggtcacgcgggagcatcgctggcgcgatatccagcagttcaatatattccgcgatgatcggcgaatcgaaccagtactcccctttctccgtcaccagcgctggcaccttacccagagggttgtattgcgccacgccgttatccgcctcgtaaggtagttcattaataaattcgaaggtaatacccttttcgagcagcagaacagagattttgcgcacaaaagggctggtgtagctaccgatgagtttcatgccgtgtcctttttgccaaccagtaaaaatcatagtatggctcaaataagacgaaaagagacacaaaaggaggttgctgaatgacataacgtgagaggactcgcgacaaaatgtttgtcggatcgtattgacgttacccggacttaaaatttcttgtgaagaggatcacaaaaattcaacaaagcaccaaaataaaaatgtgaaatatctcacataaaatggccttttaagggctaaaaattagattcgttgtttttttacacagccactttgtgatcaatatcacatcaattacctctctaccccctatatttatgtgacgcaaatcacataaattgtccctgtctggacagttgaacgattcagtgccagattgcgcagtatctacactacagggtccggctacctctgccgctacattaacaaacctcgggctttcagcctgcgcgacagcaacataagaaggggtgtttttatgtcatccgatattaagatcaaagtgcaaagctttggtcgattcctcagcaatatggtgatgcctaatatcggcgcgtttatcgcgtggggtattatcaccgcattatttattccaacagggtggttgcctaacgaaacgctggcgaaactggttggtccgatgatcacctacctgctgccgctgctcatcggttataccggcggtcgtctggttggcggcgaacgcggcggcgtagtgggcgctatcactaccatgggcgttattgtcggcgcggatatgccgatgttcctcggctcgatgatcgccggtccattaggcggctactgcattaagaaattcgacagttgggtagacggtaagatcaaatccggttttgagatgctggtgaacaacttctccgctggcattatcggtatgatcctcgccatcctggcgttcctcggtattggtccggcggttgaagtcctgtccaaaattctggcggcgggcgttaacttcatggtggcgcacgatatgctgccgctggcgtccatttttgttgaaccggcgaaaatcctgttcctcaataacgcgattaaccacggcatcttctcaccgctgggtatccagcagtcccatgaaatgggtaaatccatcttcttcctgattgaagctaacccgggtccggggatgggcgtcctgctggcgtacatgttcttcggtcgcggcagcgctaaacagtctgcgggcggcgcggccatcatccacttcctgggcggtatccacgaaatttacttcccgtacgtgctgatgaacccacgcctgattctggccgttatccttggcggtatgaccggcgtattcaccctgaccatcctgaacggcggtctggtctctccggcgtctccgggttccattctggcggtactggcgatgacgccaaaaggcgcttacttcgctaacatcgctgccatcgtggcggcaatggcggtctccttcgtggtttctgcaattctgctgaaaaccagcaaagtgaaagaagaagatgacattgaagcggccacccgtcgtatgcatgacatgaaagcggaatctaaaggcgcctctccgctggcggctggcgacgtgaccaacgacctgagccatgtgcgtaaaatcatcgtggcttgcgatgccggtatgggttccagcgcgatgggcgcaggggtactgcgtaagaaagtacaggatgcaggcctgagccagatctccgtcaccaacagcgccattaacaatctgccgccggatgtagatctggtcattactcaccgtgacctgaccgagcgcgcgatgcgtcaggtaccgcaggcgcagcatatttcgctgaccaacttcctggatagcggcctgtacaccagcctgaccgaacgtctggttgccgcacagcgccacaatactaatgaagagaaagtacgcgaccatctgaaagacagctttgaggagggtgataacaacctgttcaagctgggcgcggagaatatcttcctgggccgtaaagccgctaacaaagaagaggcgattcgctttgccggtgaacaactggtgaaaggcggctatgttgagccggaatacgtcgaagcgatgctggaccgcgaaaagctgacgccgacttacctcggtgaatccatcgcagttccgcacggcacggtggaagctaaagatcgcgtgctgaaaaccggcgtggtgttctgccagtatccggaaggcgtacgcttcggtgaagaagaagacgatattgcccgtctggtcattggtatcgccgcacgtaacaatgagcacatccaggtcatcactagcctgaccaacgcgctggatgatgaatccgtgatcgaacgtctggcgcacaccaccagcgtggatgaagtgctggaactgctggcaggtaaaaaagcttaacagttaagcatccccaaaatagttcgagctgcaggaaggcggcaacgcagtgaatccccaggagcgtacataagtacgtgactggggtgagcgaggagagccaacgcatctgcagttcgaaatatgaaggcgatatcctctcccttgtggagagggttaggttgagggaaaagcctcaccccagccctctcgggtaaaaacattaatgaaggttaatactatgaaagcattacattttggcgcaggtaatatcggtcgtggctttatcggcaaattgctggctgacgcggggatacaactgacgtttgcggatgtaaaccaggtcgtactcgatgccctgaatgcccgtcatagctatcaggttcatgttgtgggtgaaaatgagcaggtggataccgtttccggcgtcaacgctgtcagcagcatcggcgatgatgttgtcgacctgattgcccacgttgatttaatcaccactgccgtgggcccggtggtgcttgagcgtatcgctccggctatcgctaaagggctggtaaaacgtaaggcgcagggcgtggatgccccgctgaatatcatcgcctgtgaaaatatggtgcgcggcaccacgcagctgaaaggccacgtaatgaacgcgctggcggatggcgataaagcctgggttgaacagcacgtcggttttgtcgattccgccgttgaccgtattgtgccgccatctgcttctgcgaccaacgatccgctggaagtgacggtagaaacgttcagcgagtggattgtcgataaaacccagtttaaaggcgcgttgccaaacattccggggatggagttaacggataacctgatggcatttgtcgaacgtaaactcttcacgctgaacacaggtcatgctataaccgcgtacctcggcaaattagccggtcatcaaaccattcgcgacgctattctcgatgagagtattcgcgcggtggtgaaaggcgcgatggaagaaagcggcgcggtgctgatcaaacgctacggttttgatgccgacaaacatgcggcatacattcagaaaatcctcggtcgttttgaaaacccgtatctgaaagatgacgtcgaacgcgtaggtcgtcagccgctacgcaaactcagcgcgggcgaccgtctgatcaaaccgctgcttggcaccctggaatatggtctgccgcatgtaaatctggtcaaagggatcgcggcggcgatgcatttccgtagtgatgaagatccgcaggcgcaggagttggcggctctgattaccgaaaaaggcccgcaggccgcgctggcgcaaatttccgggctggatgccaatagcgatgtggtggcggaggcggttaacgcatataacgcgaccaaatgacgcagaatccggcgcaggttagcctgcgcccaaataacagattgtcagatatgcaggcaataatggaacaaacccaggcctttgaaaatcgtgtgcttgagcgtctgaatgctggcaaaaccgtaaggagcttcctgattaccgccgtcgagttattgaccgaggcggtgaatattctggtgcttcaggtgtttcgcaaagacgactatgccgtgaaatacgctgtggaaccgttgctggacggcgacgggccgctgggcgatctttcggtacgtctgaaacttatctatggcctgggcgtactcagccgcaccgaatatgaagatgcggagctgttaatggcgctgcgcgaagagctgaatcacgatggcaatgagtacgcctttaccgacgatgaaatcctcgggccgtttggcgaactgcactgcgtcatggcgctaccgccgccgccgcattttgatacgtccgacgcggcgctatacgccatgcaaattcagcgctaccagcaggcggtgcgttcgacgatggtcctctctctgaccgagctgatttctaaaatcagcttaaaaaaggcctttcaaaagtaaatcccgctgttaacctctttcttcttcttttggtcggtacagccgccggtaatattccagacgctgcaaataaatgggcgcgctctccgacggcacctcggaaggaacataatcacgcggcggcgttttattcaggtattcacggaacgcctggctggacgccataaaatcgacggctttatcaataagaagtggtacgttctcacctatttttgccatgatagatcctccatgtgggacccgcgtctgactcccgcggtcgcttatttgagtttaggatcaatttagcgttgtcattgaggaaaatgtgcttaatcgcttttcttgccgacaaaagggcgcttcatcttttctttcgacaaaaaggattttattctcaacgagataattaaataatgagcagtgtaatacttgccataattgattatctttacgtcatgagttgtgaagaatcactcactgcgcgcatactataaggtatctatcccatttctatcagaagctatcccatgaaagaagttgaaaaaaacgaaattaaacgcctgagcgatcgtcttgacgctattcgccaccagcaggcaggtctctctctggttgaatccgccgataaatacgcggagctggaaaaagaaaaagagacgctagaagcagaaattatccgtctgcgcgaagtacacagccagaaactgagtaaagaagcgcagaagctgatgaacctgccgtttcgccgcgcgatcactaaaaaagagcaggccgacatgggcaagttgaagaaaagcgtgcgtggcctgattgttgtccacccgatgacggcgctgggccgggaaatggggctcaaagagatgacaggtttcgcgaagagcgagttctaaaccttccgcatcccaggctctcaggacacccgttgtacggaggatgtcttgagagcatcgggctatattccgaatttttcatggaactatttacaccgcttatatacaagttcatttttaacggtagtccctgctttttcaggatgaaaaattccactatcatgcctgtttgtatttatacaatgaatttttttcatccccttttcttatatcccgcagaatatgattgacccgcaaaattaaataacattatcatccctgaaaaaaaatcccccatacataaacattataattatatttttataaagcattgctatgagcaattgataaataacgtcgggtttttgcgcgcttctatagaagcgacgaatgttttcattctaaccatacgttaatgagttattggcaatactcgctgaatgatgagctagttgtataaataacaggttaactatttatattatataaattattaacaaggatatttcatatgcacaaaaatggaaaatttatccccctgcttgcgttgggattcacattctttttatctggttgtgattacttcgcagataaacaccttgttgaagaaatgaaagaacaacaaaaagaacaagaaacaaagataaacctgttagaaaaacaacaaaaagaacaagaagcaaagataaatctgttagaaaaacaacaagctacgattatcaacacaaccaaaaaggtcaccgaagtcgttggccgcgttgaacgcaaacaacggctattcgactatacagaactggacccatcacaaacgcactattttattattaacaacggcaatatcggattagccgggcgtattctatctattgagccaatagataatggaagtgttattcatcttgatttagttaacttactcagcattccggtatcaaaccttgcgtttaatatgacatggggtacgaaaaaaccttccgaggcaaaagatctgcctcgctggaaacaactcctgctcaacacgaaaatggactcgacaatcgaactcttaccgggagcatggacaaacgtcacgctaacattaaaaggcgtatcgcccaataatcttaagtatctaaaaataggtattgacatggagaatgtcatattcgacagcatacaacctattaacgatacaaaaaagaagccaaaaaaataatagccattgatacaattattttagaaaaggaaattactcattcatgaatagaatatttaaagtcctctggaatgccgctacgggaacatttgttgtcaccagcgaaaccgcaaaaagccgcggcaaaaaaaacggccgcagaaagctggcagtttccgcactcatcggtcttagcagcattatggtttctgcggatgcactggccaacgcaggaaacgatacaggcgacggcgttactccaacgggtacccagactggaggaaaagggtggattgcaattggtaccgatgccacagccaatacttacaccaacgttgatggcgcaagcgccgcaatgggttataaagcctccgcgatggggaaatggagtaccgccattggttcctacagccagtccaccggcgactcttcgttagcgcttggcgtaaaatcggtttcagccggtgaccgggccattgcaatgggcgcctcatcctcagccagtggaagttattcaatggcaatgggcgtgtatgccaattcgagcggcgcaaaatcggttgcgttaggttataaatctgtcgcgagcggagcaacttcctctgcattaggttatcaagctactgcgagcggcgacgacagcgctgcttttggtaatggcgcaaaagcgataggcaccaactcagttgcccttggctcgggctctgtcgcccaggaagacaattccgtcgccgtgggtaacagcaccactcagcggcagataacctacgttgctaaaggcgacatcaattccaccagtaccgatgccgttacaggtgcgcaaatttattctttaagtcaatccgtcgccgaccgactcggcggaggggcttccgttaatagtgatggtacagtgaatgcgcccctctacgaggtaggcacaggcatctacaataacgtaggtagtgcattaagcgcacttaacacgtctatcactaacacagaggcctctgtcgcaggattagccgaagacgcgctgttgtgggatgaaagcatcagcgcctttagcgctagccacacgggaaacgccagcaaaatcaccaatctggcggcgggtaccctggctgcggacagcaccgatgccgttaacggctctcagttgtttgatacaaatgagaaagtggataagaacactgctgatatcgccaccaataccggcagcatcaaccaaaacactgccgatattaccgctaataccgacagcattaaccagaacacaaccgatatcgccgccaatacgaccagcatcaatcagaacaccactgatatcgccaccaacaccaccaatatcaacagtctgagcgactccgtcaccacgctcaccgatgatgcactgctttgggatgcagcctctggcgcattcagcgctaagcacaacggaagcgacagcaaaatcaccaatctggcggcgggtaccctggccgctgacagcaccgacgccgttaacggctcccagttgtttgatacaaatgagaaagtggatcagaacaccgctgatatcaccaccaataccaacagcatcaatcagaacaccactgatattgccaccaacaccaccaatatcaacaacctgagcgattccatcaccacgctcaccgatgatgccctgttgtgggatgcagcctctggcgcattcagcgctaaccacaacggaagcgccagcaagatcacaaatctggcggcgggcaccctggccgcggacagcaccgatgcggtgaacggctcccagttgtttgccaccaacgaaaatgtgtctcagaacaccgctgatatcaccaccaataccaacagcatcaatcagaacaccactgatattgccaccaacaccaccagtatcaacaacctgagcgattccatcaccacgctcaccgatgatgccctgttatgggatgcagcctctggcacattcagcgccagccgtagcggaagcgccagcaagatcaccaatctggcggcgggcaccctggccgcggacagtacagacgcggtgaacggctcccagttgtatgaaaccaaccagaaggtggatcaaaacacctctgctatcgcagatattaatacgtccatcaccaatcttagctctgacaacctgagctggaatgaaacaacgagttcgttctctgccagccacggaagtagtacgacaaacaaaatcaccaacgttgctgccggagagctgtctgaagaaagtaccgacgcggttaacggatcgcagttgttcgaaaccaatgaaaaagtggatcagaacacgaccgatatcgccgccaataccaccaacatcactcagaacagcaccgcgattgagaacctgaatacttctgtctccgacattaatacgtccattaccggcctcactgataacgctctgttatgggacgaagacaccggcgctttcagcgcaaaccacggtggaagcaccagtaaaataaccaatgtcgccgccggggcgctttctgaggacagtacagacgcggtaaacggatcacagttgtatgaaaccaaccagaaggtggatcaaaacacctctgctatcgcggatatcaatacgtccatcaccaaccttggtaccgatgcactgagctgggatgacgaagagggtgcgttcagcgccagccacggtaccagcggtaccaataagataaccaatgtagcagcaggtgaaatcgccagtgacagtactgacgccgttaatggctctcagctctatgaaactaacatgctgatttctcagtataatgaatctattagccaactagccggcgataccagcgaaacctatatcacggaaaatggtaccggcgtgaaatacatccgtacgaatgataacgggcttgaaggccaggatgcatacgcaacgggtaacggcgcaacggcagtaggttacgacgccgtcgcctctggcgctggcagtctggctcttggccaaaacagcagcagcagcattgagggcagtatcgctttgggcagtggctccacctctaaccgcgctattacaaccggtatacgagaaacgagcgcaacaagcgatggcgtggtgattggctacaatacaacagacagagagttgctgggcgcgttgtcattggggacggatggagaaagctatcgtcaaattaccaacgttgctgacggctctgaagcgcaagatgcggtaacagttcgtcagttacaaaatgccattggtgcggtcactactacaccgaccaagtactaccacgcaaactcaacggaagaagattcactggctgtcggaactgactcactggcaatgggtgcgaagaccatcgtcaatgctgatgcaggtattggtattggtctgaatacactggtgatggctgatgccatcaacgggattgctatcggttctaacgcacgcgccaatcatgcaaacagtattgcaatgggtaatggttctcagaccactcgcggcgcacagactgactacaccgcctacaacatggacacaccgcagaactctgtcggtgagttctctgtcggcagtgaagacggccaacgtcagatcactaacgtcgcggcgggttcggcagataccgatgccgttaacgttggtcaattgaaagtaacggacgcgcaggtttccaggaatacccagagcattactaacctgaatactcaggtatcgaatctggatacccgcgtcaccaatatcgaaaacggcattggcgatatcgtcactaccggtagcaccaagtacttcaagaccaacaccgatggcgcagatgcaaatgcccagggtgcggacagcgtcgcgattggctctggctctattgctgccgctgaaaacagcgtggcgttaggcacaaattccgtcgcagatgaagctaatactgtgtctgtcggctcttctactcaacaacgccgtattaccaacgttgccgcaggggtgaacaacactgacgcggttaatgtggcgcaactgaaagcctcagaagcaggctccgtgcgttatgaaaccaatgcagatggctcggttaactacagtgtgctcaacctgggagacgggagtggcggcaccactcggatcggcaatgtttctgcggcggtgaatgatacggatgcggtgaactatgcgcaattgaaacgcagcgtcgaagaagcaaacacttataccgaccaaaaaatgggtgaaatgaacagcaaaatcaaaggcgtagaaaacaagatgagcggcggtatcgcctcagcgatggcgatggccggtctgccacaagcctacgccccgggcgccaacatgacctcgattgctggcggtacgtttaatggtgaaagtgccgtcgccattggtgtctccatggtaagtgaaagcgggggctgggtgtataaattgcaaggaaccagcaacagccagggcgattactctgcggccattggcgcgggcttccagtggtaatgaagtaacaacactcccgacatcaaaggcaatggcataatgccattgccttttcacttccctttgctgtcctctcccctcaattggccctaccaattttagccagttaccacagcctactcacatttcattaaattaactctacaataccgttgccaataaataacatctggttaactatttgttgtcattatccatacacaacaatattggcaggaccacttttacacataatgtgaccccaacgagatgagcaaagattcatcccattatgcgtgtggttctcaggagacctgcaatgaacctctggcaacaaaactatgacccggcgggtaatatctggctttccagcctgatcgcatcgctcccaatcctgttcttctttttcgccctgattaaactcaagctgaaaggctatgttgccgcttcgtggacggtggttatcgcgctcgccgtcgcgctgctgttctataaaatgccggtcgatcacgcgctggcatcggtcgtgtatggcttcttctacgggctatggccgatagcctggataatcatcgccgcggtctttgtctataaaatttcggtcaagaccgggcagtttgacattattcgctcgtcaattctgtcgattacccccgaccagcgtctgcaaatgctgattgtcggcttctgcttcggcgcgttccttgaaggcgcggcaggtttcggcgcgccggtggcgataaccgccgcgctgctggtgggtctgggctttaatccgctgtatgcggcagggctgtgcctgattgtaaacaccgcgccagtcgcctttggcgcgatggggatcccgattctggttgccggacaggtcacgggcctggacagctttgaaatcggtcagatggtcggtcgtcagctaccgttcctgaccattatcgtcctgttctggattatggcgattatggacggctggcgcggcgtgaaagaaacctggcctgcggtgatggtcgctggcggctcgtttgctatcgcccagtatctcagctccaactttatcgggccggaactgccggacatcatctcttcactggtgtctctggtgtgtctgacgctgttcctcaaacgctggcagccggtacgcatcttccgcttcggcgatatgggcgcgtcgcaggtcgatcagacgctggcccgcacccgctatacgacagggcaaattgttcgcgcctggtcgccgtttctgttcctgaccgccacggtcactctctggagcgtaccgccgtttaaagcgttgtttgcccccggcggcgcgctgtatgactgggtaattaacgttccggtaccgtatctcgataaactggtcgcccgtatgccgccggtcgtacacgaagcgaccgcttacgcggcggtgtataaatttgactggttctccgccaccggcacggcgatcctgtttgccgcgctgttgtctatcgtctggctgaaaatgaaaccctcagccgcaatccagacctttggcagcacgctgaaagagctggcgttgccgatttactccatcggcatggtgctggcgttcgcgtttatctcgaactattccgggctttcttccacgctggcgttagcgctggcgcacaccggcagcgccttcacgttcttctcgccgttcctcggctggctgggggtattcctgaccggctcggatacctcatctaacgcgctgtttgcctctctacaggctaccgcggcgcagcaaatcggcgtctctgatgtgctgatggtggcggcgaataccactggaggcgtaaccgggaagatgatctcgccgcagtctatcgccatcgcctgcgcggcggtggggctggtagggaaagagtccgatctgttccgttttaccgtcaaacacagcctgatcttcacctgtatggtgggcgtgatcactacgcttcaggcctatgttttaacctggatgattccgtgattgtgatgccaaaacgcctgtcagacgagattgcctctcgcgtgcgggcgctgattgaagaacaaaacctggaagcgggcatgaaattgcccgccgagcgccagttggctctacagcttggcgtatcacgcaactctttacgcgaagcgctggcgaagctggtcagtgaaggcgtgctggtgagtcgtcgcggcggcgggacatttgtccgctggcagcacgaaacctggtctgaacagaatatcgtgcaaccgctgaaaatgctgatggcgaacgatccggactacagtttcgacattctggaagcccgccacgccattgaagccagtacggcctggcacgccgccatgcgtgccaccgctgccgacaaagagaaaatcagactctgctttgatgcgacgctcagcgaagacccggatctcgcctcccaggccgacgtgcgctttcatctggcgatcgcggaagcctcgcacaatgtggtgctgttgcaaaccatgcgcggtttcttcgacgtcctgcaatcctccgtcaaacagagtcgccagcgtatgtatctcgttccgcccgtattctcaaagctgacggaacaacaccaggcagtgatggacgccattctggacggtaacgccgagggcgcgcgtaaagcgatgatggcgcacctcagttttgtccacaccacgattaaacgatttgatgaagaccaggcccgccaggcgcgtattacccgcctgcccggcgaccataatgagatgaccagggagaataaatcatgattatttcagcagccagcgattatcgcgccgcagctcagcgcacgttgcctcctttcctcttccactacatcgacggcggcgcgtatgcggaatataccctgcgccgaaatgtggaagacctgtcgcaagtcgctctgcgccagcgcgtgctgaaaaatatgtccgatttaagcctggaaacgaccctgtttaacgaaacgttgtcgatgccggtggcattagcgccggtaggcctgtgcggcatgtacgcccgtcgcggcgaagtacaggccgccgccgccgcagacgcaaagggcattccgttcaccctttccaccgtctccgtctgtccgattgaagaagttgcaccaaccattaagcgcccgatgtggttccagctttatgtactgcgtgaccggggctttatgcgcaacgcgctggaacgtgcaaaagcggcgggctgctccacgctggtctttaccgtggatatgccaacgccgggcgcgcgctaccgtgacgcccactccgggatgagcggcccaaacgcggccatgcgccgttactggcaggcggtgatgcaccctaaatgggcgtgggatgtcggcctgaacggtcgcccgcatgatttaggcaatatttccgcctatctgggtaaaccgaccggccttgaggactatatcggctggctggcaaataacttcgatccgtccatctcctggaaagatctggagtggatacgcgaattctgggacggcccaatggtgatcaaagggatcctcgatccagaagatgcccgcgatgcggtacgtttcggcgctgacggtatcgtggtgtcgaatcacggcggccgccagctcgatggcgtgctctcttccgcccgcgccctgcccgccattgccgatgcggtgaaaggcgatatcgccattctggcggatagcgggatccgtaacgggctggatgtcgtgcgtatgattgcgttgggggccgataccgtactgctgggtcgggcctatctctacgcgctggcgacggcaggaaaagcgggtgtcgccaacctgctggacctgattgagaaagagatgaaggtcgccatgaccctgaccggcgcgaaatccattagcgaaatcagtggcgattcactggtgcaggaactggggaaaagtttgcccgccgcgctggcgccaatgagcaaaggcgatgccgcctgaacgcctggcgcgtgagagcccggtaaatttctgctattctgcccccgcatttaagggggcatcatgcttaacatcgtactcttcgaaccagaaatcccgccgaataccggcaacatcattcgtctttgcgccaataccggctttcgtctgcacatcatcgaaccgatggggtttacctgggatgataagcgcttacgccgcgcagggctggactatcacgaattcgccgcggttcagcgccatcacgattatgccgcctttgtcgccgccgaaaatccgcagcgcctgtttgcgttgacgacaaagggcacgcccgcccatagcgccgtaagctatcaggatggcgattatttgatgtttggcccggaaacgcgcggcctgcccgccagcattctcgatgcgttgcctaaagagcagaagattcgcattccgatgatgccggatagccgtagcatgaacctgtcgaatgcggtgtcggtggtggtgtatgaagcgtggcgccagttaggatatcccggcgcggtattgcggtcgtaatatattcaatgccggatggcggctaacgcctgatccggcctggccgatcccgatggcatgttcccgtttatgcggactctcgcccaatcaaatgaaagccaatatccacaatagcttctgcgcacggtttctgttcaatacgatcggccaacagcgtagcggcgcgctggccaatggcgcgtctgtcaacgcttacggtagtaattgatggtcgattgctggcggcaaaatcaaggtcgccaaaaccaataaccgctaaatcatgcgggatgcgcaaaccacggctttccgcctccatcatcgccccctgtgccagggtatcagaactgcaaacaatgacatcaaacgtcccttcgtcaaaaagctggcttaaaccgctgcgccccagcgaaagcgatgccggaagggggacatctacctgcggtacggcatgaatagcgtggcgttgaagaacactacataacccctgcttacgttgcgcggctcggcgatcggcagtccacaacaagccgggacgacgatagcccttactcagaagatactcccccgtcgcctgcccgactttttcatgggaaaaaccgaccagcatatcaagcggcgtgggcgttaagtcccaaatttccaccaccggaatagccgcgttcaggatgacctttttcagttctatcgtgtgatggatcccggtaagcaccacgccatcggggcggcgggaaagcagtgtcgccaccaactccgcttccgtttgttcggtatatcccgccacgcacagcaatatgtgatatccgcgtcgggccagttcatcgctcagcgactggatggtatcgacaaacatgttgttgttaatttgcggcacgacgacagcgattaatttactccgtcgcgacgccagaccaccggctaacgcgttgggtatgtagcctgtgacgcgaaccgcctgcatgactttctcaaccgttttggggcgaaccagttgtggcgaattcaatgcccggctgactgtcatcggagacagcccggcgctacgtgctacatcttccagcgtcggcgcacgaggtgatttggttctcttcacgtctgatgcccctgcaaagattggctgatttatccgcgcattattcatcatgcctgcggctattgccagcttcgcatcaggaaaggccgtaaatacagtagcttatcaagctcagtcattacaaaatgatagcgccatcattttgtattatgcatttccccagatatttttggatcgtgatccattttgcaataaatcctgctttttatacgacatatgtgatcaaatgttcaaatcaacatcaactttctggatcctgcgttcgcttaataataaaaatgttagcgcaatcattttgtgattatcaggagaaaaaaaatggctttaagcgcgaattccgacgccgtaacgtatgcaaaagcggcgaataccagaaccgcggcagaaaccggcgatcgtatcgaatgggtgaagctatcactggcttttctaccgctggcgacgccagtgagtgacgcgaaggtactgaccgggcgccagaaacctttgaccgaagtggcaatcatcattgccgaaatccgcagtcgcgacggctttgagggcgttggttttagctactccaaacgtgctggcggccagggtatttatgctcacgccaaagagatagccgataatctactgggcgaagatcccaatgatatcgacaaaatatacaccaagctgctgtgggccggagcctcggtggggcgtagcgggatggcggtacaggctatctcccctatcgatatcgccttatgggatatgaaggctaaacgtgccggtctgccactggcaaaactgttgggcgcgcaccgcgactccgttcagtgttacaacacctcaggggggttcttgcatacaccgctcgatcaagtgctgaaaaatgtggtgatttcccgcgaaaatggcattggcggtattaagttgaaagtcggacaacccaactgcgctgaggatattcgccgcttaaccgcagtacgtgaagcgcttggggatgagttcccgttaatggttgacgctaaccagcagtgggatcgcgaaacggctatccgcatggggcgtaaaatggaacagttcaaccttatctggattgaagaaccattagatgcttacgacatcgaaggccatgcccagcttgctgccgcgctggatacgcctatcgccaccggggaaatgctgaccagtttccgggaacacgagcagttgattctgggcaatgccagcgatttcgttcagccagatgcgccgcgtgtcggcggtatctctccgttcctgaagattatggatctggcggcgaaacacgggcgtaagctggcgccgcactttgcgatggaagtacacctgcacctttccgcagcgtatcccctggagccgtggctggaacatttcgagtggctgaacccattattcaacgagcaacttgagctgcgcgatggccgcatgtggatttccgatcgtcatggtctgggtttcacgctcagtgaacaagcgcgccgctggacacaattaacatgtgaatttggcaaacgcccttaacccgactggcgggaatccgtcccgcctctcttaccttacaggatgcattctgcccttatctgaggagtagataatgaacacaataataaagcgcacaaaagtgcgtcataccattcttatatttttatttcttgctaccgtatttaattatgcggatcgcgcaactctatccgtagttgccccaataatgagtaaagaattaggttttgatccggaagcgatgggcctggccttctcctcatttggtattgcctatgtcattatgcaactacccggcggttggctattagaccgctacggttcacgactggtttacggttgcgcattgattggctggtcgttagtaaccatgtttcagggaacgatctatctgtatggcagcccattaattgtactggttattctacgtctgctgatgggcgcgattgaagcgcctgcctttccggcgaacagtcgtttaagcgtacaatggtttcccaataatgaaagaggcttcgttacttcagtttatcaggctgcgcaatatatctcgctgggcattatcaccccgctaatgacgatcattctgcataatttaagctggcattttgtcttctattatattggcgctattggcgtgatgctcggtatattctggttaatgaaagtcaaagatccgatgcaccatccaaaagttaatcaagcggaaattgactatattcgtagcggtggtggcgagccctctctgggctgtaaaaaggagccgcagaaaataacgttcgcgcagattaaaaccgtctgtgttaaccggatgatgatcggtgtttatatcgggcaattctgcgtcacctctatcacctggttcttcctgacctggttcccgacctatctgtaccaggcgaaaggcatgtcgattctgaaagtcggttttgtggccagtattccagccattgccggttttattggcggcctgctcggcggcgtgttctccgactggctactcaaacgcggctatagccttaccgtcgcgcggaaattgcctgttatctgcggtatgttgctctcttgcgtaattgtgatcgccaactacacctcttcagaatttgtggtcattgcggcgatgagtctggccttttttgccaaagggtttggtaacctgggctggtgcgtactcagcgacacctcgccgaaggaagttctgggtattgctggcggcgtatttaacatgtgcggcaatatggcaagcatcgttacgccactggtcatcggcgtgattcttgccaatactcagtcgttcgactttgccattttatacgttggctcgatgggacttattggtctcatttcatatctgtttatcgtcggcccgctggatcgcatcacgctgacatcatccgcagcctgattgtccacattgcgaattcttcgctccgctgttccgggattgcactccatcggaacagcgttttttagttgtaccgcgcaattcagatgccgtcgccatactcaaacgtatggtgtatcccgttgaaatgctggtccatatccatcgacggcttatcgctgcccggcttgccgacaatacgcgccggaacgcctgcggcggtagtgtgcggcgggacaggctgtaaaacgacggaacctgcgccaattttcgcgccgcgccccacctcgatattgccgagaattttcgcgcccgcgccaatcatcacgccttcgcggattttaggatgacgatcgccgctcgttttcccggtaccgcccagggtgacggattgcaagatcgacacatcatcttcaataaccgccgtctcccccaccacaataccggtggcatggtcgagcataatcccgcggccaattttcgctgccgggtgaatatccacctgaaacgagaccgaaacctgattttgcaggaagatagccagcgcgcggcgacctttattccacaaccagtgaccaatgcggtaggcctgtagcgcatgaaagcctttcagatataacagcggcgtggagtatttatccaccgccggatcgcgagtgcgcacggcctgaatatcgcaggctgccgacgcgatcatttccgggtcggcggcataggcttcttcaactacttcacggatagcgatagcgggcatgatgggcgaagccagtttatttgccagcatatagctcagcgcactgcccagattttcatgcttgagtagcgtggcgtgataaaaactggccaacataggctcacagtcagctaaagcgcgggcttcagctttaatattcttccagacgatttccagttcttcacacggcatggcttactccagacgggcagaaaacgaccaacccgttctgtgcgggttgggtcgtttatgcaaacagttccttacggctagtggcgactcagctcttccttgcgggcgcgacctaataacgttaatgctgcctcgcgcgcgttttttccgcaatacaatacttgataaatttcctcggttattggcatttcaacaccaaaacggtgcgccaattcacgaacttctttcgtattgcgatagccttcgaccacctggccaatcttatcctgcgcgcctttaacgtccatgccctggccaagcatcatgccaaaacgacggttgcgcgactggttgtcggtacaggtcagcaccagatcgcctaaacccgccatccccataaaggtggcgggatcggcaccaagcgctgcgccaagccgcgacatttcggtcagtccacgcgtgattagcgccgtgcgggcgttcgcgccgaagccgatgccgtcagacatccccgcgccaatcgcaatcacatttttcaccgcgccgccaagctgcacgccgataaaatccgcattgatatagacgcgaaaactttttccgcagtgcaacagttgctggagatcgtcggcaaaggtctcatcggttgaggccagcgagattgccgtcggcaaacccgccgccagctctttagcgaacgtcggaccggaaatcaccgccagcgggatttgatcgcctaacgcctcgcgagcgacatcctgcaacaggcgccccgtttccgcttccaggcctttggtcgcccataccagacgcgcatccggacgcatcagcggtttaatctgccgcagcacgtcgctgaaaacatggcttggcaccaccaccagaatgttacgactggccgccagcgcggttgctaagtcgctttccaggtgtaacgtatcgggaaaaggcacatcgggaaggaacgcgacgttgcagcgatcgtgctccagggtcgcgatatgttttgggtcgtggccccacaggacaacctggtggccgtttctcgccagagtgatggcaagagcggtgccgtacgagccggcaccgatgactgtcattgacgcattactttggttcatcaggcatcctgatgttcttcagtaccttcgccagcctgctgctgcaaatagttcatgaacagcgcatcaaagttgaccggcgcaaggttcagttgcgggaacgtaccgcgtgaaaccaggctggtgatgcactcgcgagcatacgggaacagaatgttcgggcagtatgcgcccaggcaatgcgccatctgagtaccttcaataccgctgatggagaaaataccggcctgctgaacttcgcacaggaacgcggtttcttcccccagggaagccgttacggtaacacgcagcacaacttcataaacgtcatccgccagttgggaagatgccgtatcaagatccagtttaacctctggctgccaatctttctggaaaacatgcggtgcgtttggcgcttcgaaagaaacatccttggtatagatacgttggatctggaaagccatttcagtgttattttgttctgacatgtgtaaaaccctttagtgttgtccttaaatacttgagtacgccttaacgcaacagcggatccagtccaccacgcgcatccagcgcatacaagtcgtcacaaccgccaatgtgctgtgcatcaataaaaatttgcggaaccgtcgttcggccactacgtttgatcatctcttcacgcttcacggcgtcgccgtcaatcgcaatttcctggaaactcacgcccttgctgtttaacagcgcctttgcacgatggcaaaacgggcaggttgctttggtgtagatttcaatattggccatgacttcgctcctgtttttttacccgatggatttcatgtcgacgcaagggcaagtcattccccttgcgtcatgaaaacgacgggtaatcacttaccgcgcaccagaggcagattctcgccgctccagcctgctacgccttctttcaacacaaagaccttttcaaagccggcttttgtcagcgcgttagcggattcctggcactgcataccagaaccgtcgaccacgataatcggcttgtctttgtgcttttccagttcgccaacattgttggctttgatttcgctcggcagcaaattggtcgcgccagcgatatggcctttacggaaatcgtcacgttgacgtaaatccacaacaacggcgtcctctttgttgataaggcgcgtggcttcgccgcgtgtaatcaccttaacttttgaagtcagacctttgaacgtggtaaataaaaccgccaccagtaacgcaatccaggcgatactcagtatgggatgacggccaacaaattgcataatttcttgcatggggggtaacaactcccgacgtagtgattaaaaaaccaggaaaggagtatacctgtgcagtggcgcaaatacagccagagcgtgcactggaatgcatttttgcggggcgctacgaaaaaaaatcacgctattacttgccttctcacgccagcgcgatccctttctttgatcttctgaggctattttatcgattcagctgtagtaaaattacgcaattattttgtctattgagtatgaggttgtcgcaatgtcggtttctaaaaaacctatggtactggtgattctggatggctacggctaccgtgaagaacagcaggataacgctatcttaaacgccaaaaccccggtgatggatgctctgtgggcaaaacgtccgcataccctgatcgacgcatccggtctggaagtgggtctgcctgaccgccagatgggcaactccgaagtgggccacgttaacctgggcgcaggccgcatcgtttatcaggacctgacgcgtctggacgttgaaattaaagaacgtactttctttgctaacccagtcctgaccaatgcggtagaccaggcgaaaaacgccggtaaagcggttcatattatgggtctgctgtccgcgggcggcgtccacagccacgaagatcacattatggcgatggtggagctggccgcagagcgcggcgcagaaaaaatctatctgcacgccttcctcgacggtcgcgacacgccgccgcgcagcgctgaagcctcgctgaaaaaattcgaagacaaattcgccgcgctgggcaaaggccgcgtggcgtctatcgtcggtcgttactacgctatggaccgcgacaaccgttgggatcgcgtggaaaaagcgtatgatctgatgaccctggcgcagggcgaattccaggcagataccgctgtggctggcctgcaggccgcttacgctcgtgatgaaaacgatgagtttgtcaaagcgaccgttatccgcgccgagggccaggctgatgcggcgatggaagacggcgacacgctgattttcatgaacttccgcgctgaccgcgcgcgcgaaattacccgcgctttcgttaatgctgatttcgacggctttgcgcgtaagaaagtggttaatctgaacttcgtgatgctgaccgaatacgccgccgacatcaaaactgccgttgcctacccaccagcgtcgctggcgaatacctttggcgaatggatggcgaaaaacgacaaaactcagctgcgtatttccgaaacggaaaaatatgcgcacgtaacctttttctttaacggcggcgtagaagaaccgtttgctggtgaagagcgcattctgatcaactccccgaaagtggccacttatgacctgcaaccggaaatgagctctgcagaattgactgaaaaattggtcgcggcgatcgaaagcggtaagtacgacaccatcatttgtaactatccaaacggcgatatggtcggtcataccggcgtgatggaagccgccatcaaagcggtggaagcgctggataactgcattgaacaggtaacaaaagcggttgagtccgttggtggacaactgttgattaccgcggaccacggcaacgcggagcagatgcgcgatccggcgaccggtcaggcgcataccgcccacaccaacctgccggtgccgctgatttatgtcggcgagaaaaacgtgaaggcggtcgaaggcggcaaactttcagacattgcgcctaccatgctgtcgctgatggggatggaaatcccgcaagagatgactggtaagccgctgttcatcgtggaataatccctccccatgaggggaaaggcgattaacaccattcaacaggccgtgaaaccaagaacgttttcagtcaggcctttgttctacgccagcgtacttagcgctggcgtattgttgtgcgccttttccgcccacgcggatgaccgtgatcaactcaaatctattcaggccgatatcgccgcgaaagaacgcgacgtacgccagcagcagcaacaacgcgccagcctcctggcacaacttaaagcccaggaagaggccatctcagccgcagcacgtaagctgcgcgaaacgcaaagcaccctggatcagttaaacgcgcaaattgatgagatgaacgcctcaattgccaaactggagcagcaaaaagccagccaggagcgtaatcttgccgcgcagttggacgccgctttccgccagggcgaacacaccggcattcagcttattcttagcggagaagaaagccagcgtgggcaacgcctgcaggcctacttcggctatctgaaccaggcgcgccaggagactatcgccgagctgaaacagactcgcgaacaggtcgccacgcaaaaagccgagctggaagagaagcaaagccaacaacaaacgttgctgtatgagcagcgcgcccagcaggcgaagctggaacaggcgcgtaatgaacgtaagaaaacgcttgccggactggagtcgtctattcagcaaggccagcaacagttaagcgaactacgcgccaacgaatcacgcctacgcaacagtatcgcgcgggcggaagcggcggccaaagcgcgagcggagcgtgaagcccgcgaagcgcaggcggtacgcgataagcagcaggaagcctcgcgtaaaggcagcacctataagccgacggaaagcgagcgctcgctaatgtcccgcaccggcggtctgggcgcgcctcgcggtcaggcatactggccggtacgcggcccgatcttgcatcgctatggcgaacggctgcagggtgagctacgttggaaggggatggtgatcggcgcgtcggaaggcaccgaggtcaaagccatcgccgacggcagggtgattctggcggactggctacaaggctatggcctggtggtggtcgtagagcatggtaaaggcgatatgagcctttacggctataaccagagcgcgctggtcagcgtaggcgcgcaggtgcgcgccggacaacctatcgcccttgtgggcagtagcggcggtcagggcagaccctcgctttatttcgaaattcgtcgccagggtcaggccgtcaatccacagccgtggttgggaagataagttttgcctcagtttcgtcgctccattctcacgctggccactttgctggcgtttgcacatcccgttttcgctggcaagctcgccatcgtgattgatgattttggctatcgcccgcacacggaaaaccaggttctggcgctgccgccaaacatctccgtcgctgtactgcccaacgcgccgcacgcgcgcgaaatggcaactaaagcgcacaatagcgggcatgaggtgttaatccatctgccgatggcgccgctaagcaaacagccgctggagaaggatacgctgcgaccagatatgagcagcgatgagatcgagcgcattatccgcgaggcggtaaacaacgtgccgtatgccgtcgggcttaataaccacatgggcagcgcaatgacttccagcctgttcggtatgcaaaaagttatgcaggcgctggaacattacaatctctattttctcgacagcatgacgattggcaatagccaggcgatgcgcgcggcatccggtacgggtgtgaaagtgatcaagcgcaaagtgttcctcgacgatacgcaaaacgaggcggatatccgtcgtcagtttaatcgcgctatcgaactggcccgtcgcaacggttccgctatcgcgattggtcatccacatcccgcaacggttcgcgtgctgcaacagatggtttatcgcctgccggcggatatcaccctggtacgtccaggcagcctgctcaacgaaccgcaggtagatacgtcccgacctggtgtgacgccgcagaaaattgacgcgccgcgcaatcccttccgcggcgtaaagatgtgcaagccgaaaaaaccgctgcaaccggtctacgctacgcgctttttcagcgtcatcggcgagagcattacgcaaagttccgtggttacctggtttcagcaccagtggcaaggctgggggaaaatcgccgcgcctaaaaacgtgagcgctaagacagattgagcgccttacgggccatacgacggtgcgacaaggttttgtcgcgccattgccacagccggaaggaccagagcagcgtctgataagctgctttcgcgctgcggacgttagccatcatccgtctatacatgccagaagtaaaaatttcggcaatcatacgctggcgggtcaaaatatcaggctctttacgtaccgcatgacaaacgcgtaacgcttcccaggtaatttgctggcgaaattccgggtaaatcggaatacgacgggcataatcacgattgagcttttctaataatcgcgtaattttaatataatgccgctgataattaagatttttattgccttgtctttgcaaacggcttaccgaattatcatgcaggaaatatttatataatgattgttcggtataacgtacgcgcgtggcattaaacataacttccgtcgaccataatatgtcctgatgatgtagtccgggaacgaaagtaatattgttatcggtaattaacgcacgtcgataaacgcccatccagacaacatgcgtccagcgccgcgaggccaacgccatacgcaaccaatccggtccgcttaataccccggtggaacgcagacgatcggtcggaatagattgccaggcgtgcccggtttttcggacgcaccagtccgcattacactgcgcaacgtccagatcatcgttaagcgccatagtcatcagcgtttcatacatcttcgggtagacctggtcatccgcatcgacaaaggcgacataatcgccggtcgccgcttgcaggccaagattacgggcgacagatgcgccagcattggcctgatgaagcagtcgaacatgtgggtaatgttccgcgtaatgttttgctatctcaacggaatgatccgtcgatccatcattcacaataataatttccagcgccgaccacgtttgcgcgattaacgacgccatgcaagcattaaaatccgctcccgcattatataacgggacaatgatactcactttggttttactatttttcataacgattaccagaaaaaccttaatttaccctgcctttatactgtggctctattaagaaactattaagccgccataattaatttttacagtaaaaagcaagcacaaaactcagagtagagcgtgacgttagcgagtaaaataagagtaaagcgcaattacgaatgcttgatgtctatgacaattctttacggctttccagattttccctaacaaaaaaggttggcgaatgacaccaaccttttacgatgaaacgtatatcagacccgataaaattatcgggtctctatacccttcatacttcaagttgcttatgtgttggctacggattactcggcccatccatgggcctcgccctgacgggccgtcgcaagcgacgttcaaatctgctcccggcagatttgtcgttcaccccagtcatatagttatctatgctcctggggactcactcccttgccgcctttaagcaactcgaattattttgggtatatacatattaatcccagctcagaataacttttcctgactggcctgaacgcatggcatcaaaacctttctggaaatcatcaatagagaaacgatgggtgataatcggtgacagatccagaccggactggatcagcgccgccattttgtaccacgtttcgaacatctcacgaccataaatacctttaatgaacaagcccttaaagataacttttgtccagtcgatagacatatctgatggcggaatccccagcatcgcaatacgaccgccgtgattcatggtgtccagcatggtacgaaacgccggcggcgcgccggacatctccagacccacatcgaacccttcggtcattcccagctccgccataacgtcgttcaggctctctttcgcgacgttgaccgcgcgggtgacgcccattttacgcgccagctccagacggtattcattgacgtcagtaatcaccacatgacgcgcgccgacatgtttcgccaccgcggcggccattacgccgattggccccgcccccgataccagtacatcttcgccgaccagatcgaaagacagcgccgtatgcaccgcattaccaaacgggtcgaaaatagaggctaaatcatcagaaatgttatccgggattttaaacgcattgaacgccgggatgaccaggtattccgcaaagcagccgggacggttgacgcccacgccggtggtgttgcgacacaggtgagtgcgaccgccgcggcagttgcggcaatgaccgcaggtgatgtgaccttcgccggagacgcgatcgccgattttaaagcctttcacttcctgaccgatgccgaccacttcgccgacatattcatgccccacgaccatcggaaccgggatggttttttgcgaccagtcatcccagttatagatgtgaacgtcagtaccgcagatggctgttttacggattttaatcagcaaatcgttatggccgacttccggttccggaacgtcggtcatccagatgccctcttccgctttcagtttggataacgctttcatcttacatcctcaggcaatcacgcccagttgtttaccaatacgcgtgaacgcgtctaccgcacgcgtaatttgctcaggcgtatgcgccgcagacatctgggtacgaatacgcgcctgaccttttggtacgaccggatagaagaaaccggtaacgtaaatgccctctttttgcagttcgcgggcaaatttctgcgcgacaaccgcatctcccagcattaccgggatgatggcgtgatccgcgcctgccagcgtaaatcccgcggcagacatctgctcacggaactgccgggcgttcgcccacaagcgatcgcgcagttctgcgcccgcttccaccatctccaacactttaatagaagccgccacgattgccggcgccagggagttggagaacagatatgggcgggaacgctgacgcaaccactcaacgacctctttacgcgccgcggtataaccgccggatgcgccgcctaacgctttgcccagcgtaccggtaataatatctacgcggcccattacgtcgcagtattcatgggaaccgcgaccgttttcgccgacaaagcctaccgcgtgagaatcatcaaccatcaccagcgcatcgtatttatcggccagatcacagacgcctttcagattggcgatgacgccatccattgagaacaccccatcggtggcgatcaggacatgacgcgcgccggcctcacgcgcctctttcagccgcgcttccagctctgccatatcgttgttggcatagcgatagcgcttcgctttacacaaacgcacgccgtcaatgatagacgcgtggttcagcgcgtcggaaataatagcgtcttccgcgcccagcaacgtctcaaacaagccgccgttagcgtcgaaacaggaggaatacagaatcgcatcttccatgccgaggaagcttgccagcttttgttccagcgctttgtggctgtcctgggtgccgcagataaaacgcacggacgccataccgaaaccgtggctgtccatgcccgcttttgcggcattaatcagctcagggtgattagccagcccgagatagttattggcgcaaaagttaataacgtggcttccatccgccacggtgatatccgcctgctgcgcagacgtaataatgcgctcttctttaaacaatccttccgcccgggcggtttccagatcgttggttaactgtttgtaaaaatccccacgcattgcgattctccagactgggcaaatttcagcacatattacccaaagcgatacgttgatacgagatgacgcgtcatcacttctttaaaatgcagcataaatcacgcgtatcctcacgggttatcagtgaatggatgaatagtgttatgataagagcattcatgtctgagacagtctctgacaccataattcaaaggttacagttatgatcatcgttaccggcggcgcgggctttatcggcagcaatatcgttaaggccctgaatgataaaggtatcaccgatattctggtggtggataacctgaaagacggcaccaagtttgtaaacctggtggatctgaacattgctgactatatggataaggaagatttcctgatccagattatgtccggagaagagctcggcgatatcgaagctattttccatgaaggcgcctgctcttccaccaccgagtgggacggcaagtatatgatggataataactatcaatactccaaagagctgctgcactattgtcttgagcgcgaaatcccgttcctctacgcctcttctgccgccacctatggcggtcgcacgtctgatttcatcgaatcgcgcgaatacgaaaaaccgcttaacgtttatggctattctaaattcctgtttgatgaatatgtgcgccagatcctgccagaagcgaactcgcagattgtcggtttccgctatttcaacgtctatggaccacgtgaaggccataaaggcagcatggcaagcgtggcatttcatctgaatacacagttaaacaacggcgaaagcccgaaactgtttgaaggcagcgaaaacttcaagcgcgacttcgtttacgtgggcgatgtggccgccgttaacctgtggttcctggaaagcggcaagtccggcatctttaacctgggcacaggccgtgcggaatctttccaggccgtcgccgacgcgacgctggcataccataaaaaaggtagcattgaatacattccgttcccggataagctgaaaggtcgctatcaggcgtttacgcaggcggatttaaccaatctgcgcaacgcgggctacgacaaaccctttaagaccgtcgccgaaggcgtcacggagtatatggcctggctgaaccgcgacgcgtaagtatgaaaattttggtcattggcccgtcctgggtgggcgacatgatgatgtcgcaaagtctctatcgcacgcttaaagcacgctatccccaggcgataatcgacgtgatggcgccagcctggtgtcgtccgttattatcgcgtatgccggaagttaacgaggcgatacccatgccgttgggccacggcgcgctggaaatcggcgagcgccgcagattgggccatagcctgcgagagaagcgctacgatcgcgcctgggtgttgccaaattcgtttaaatcggcgctgattcctttctttgccaatatcccgcaccgtaccggctggcgcggcgaaatgcgctatggcctgctgaacgatgcgcgcgtccttgataaagacgcctggccactgatggtggagcgctacgtggcgctggcttatgacaagggcgtgatgcgcacggcgaaagatctgccccagccgctactctggccacagctccaggttagcgagggtgaaaagtcgctgatgtgcagcgacttttcactatcttctgaacgtcctctgatcggcttttgccccggcgcagaatttggcccggcaaaacgttggccgcactatcactacgccgaactggcaaagcagctcattaacgaagggtatcaggtcgtgctgtttggctcggcaaaagaccatgaagccggaaatgagatcctggcggcgctgaatagcgagcagcaggcatggtgtcgcaacctggcgggggaaacccagctggaacaggccgtcattctgatagccgcctgtaaagccatcgtcactaacgattccgggctgatgcacgtcgcggcggcgctcgaccgcccgctggtcgccttgtatggcccaagtagcccggatttcacgccgccgctgtctcataaggcccgggtgattcgtctcattacgggttatcacaaagtgcgtaaaggtgatacggcgcaaggctatcaccagagcctgatcgatatcacgccgcagcgggttctggaagagcttcattcgctgttgtcggaagagggcgtttaatgcgggttttgatcgttaaaacatcatcgatgggcgacgtattacataccctgcctgcgcttaccgacgcgcaacaggcgattccggggattcaatttgattgggctgtcgaagaagggtttgcacaaattccgtcctggcacagtgctgtcgatcgcgtgattcccgtcgctattcgccgttggcgcaaggcctggttttccgcgcccatcaaagcggaacgcacagcctttcgtcgggcggtatgcgcaaaccaatacgacgctgtgattgatgcgcaggggctggtaaaaagcgcggcgctggtgacgcgtctggcgcatgggataaagcacggtatggactggagtaccgcccgcgaaccgctggccagcctgttctataaccgtaaacaccatatcgcaaagcaacaacatgcggttgaacggacgcgcgagctgttcgccaaaagcctgggatacgataaaccgcagtcgcagggcgattatgccatcgcaaaacattttctgcattgccagcaggcggttagcgatccgtatgcggtgtttttacatgccacgacccgcgatgataaacactggccggaagcaaactggcgcgagcttatcggcctggtgggcaacaccggattacggataaagcttccctggggcgcgcctcatgaggaggcccgggctaaacgactggccgaaggctttgactatgtggatgtgttaccgcgcatgagcctggaggaggtcgccagagtgctggctggcgcaaaatttgtcgtatcggttgataccggcctgagccatctcaccgccgcgctcgacagaccgaatattacgctatatggcccaacggaccctgggttaattggaggttatgggaagaaccaaatggcatgctgctcaccagaacagaacctggcgaatttagatgccacaagcgtatttggaaagattcattaaagagactctgtctcatcccaaacctattgtggagaaaagatgctaaccacatcattaacgttaaataaagagaaatggaagccgatctggaataaagcgctggtttttctttttgttgccacgtattttctggatggtattacgcgttataaacatttgataatcatacttatggttatcaccgcgatttatcaggtctcacgctcaccgaaaagtttcccccctcttttcaaaaatagcgtattttatagcgtagcagtattatcattaatccttgtttattccatactcatatcgccagatatgaaagaaagtttcaaggaatttgaaaatacggtactggagggcttcttattatatactttattaattcccgtactattaaaagatgaaacaaaagaaacggttgcgaaaatagtacttttctcctttttaacaagtttaggacttcgctgccttgcagagagtattctgtatatcgaggactataataaagggattatgccattcataagctatgcgcatcgacatatgtccgattccatggttttcttatttccagcattattgaatatttggctgtttagaaaaaatgcaattaagttggtttttttggtgcttagcgccatctaccttttctttatcctgggaaccctatcgcgaggggcatggttggcggtgcttatagtaggtgttctgtgggcaatactgaaccgccaatggaagttaataggagttggtgccattttattagccattatcggcgctttggttatcactcaatataataacaaaccagacccagaacatttactgtataaattacagcagacagatagctcatatcgttatactaacggaacccagggcaccgcgtggatactgattcaggaaaacccgatcaagggctacggctatggtaatgatgtgtatgatggtgtttataataaacgcgttgtcgattatccaacgtggacctttaaagaatctatcggtccgcataataccattctgtacatctggtttagtgcaggcatattgggtctggcgagcctggtctatttatatggcgctatcatcagggaaacagccagctctaccctcaggaaagtagagataagcccctacaatgctcatctcttgctatttttatctttcgtcggtttttatatcgttcgtggcaattttgaacaggtcgatattgctcaaattggtatcattaccggttttctgctggcgctaagaaatagataaaaaaacgcgctgatacttattacggtatcagcgcgttttccatcatcaggactcaatcacttatcaaaccagtttttcatttgttcctcgaaacgctgcgctacattttcccaactgtattttgaaaacaccagggattttgctttttcggcaatctggtggcgttccttatcagcaagcgcacggttaatatcattaattatactgtcgctcgacataggttctgcgaggtgatagcccgttatgccatctaacacaaattcgctaatccccccttttttgctggcaagaaccgcttttcctgctgccatcgcttctacagccaccatgcaaaatgcttcttcaacctgagatggcacaataaccagatcggctatatgatagaagttatgcatctggtcaggagattgccccccagccataatacaatccgttccaatctcttttgcggcgtccagtactttcttttgatactctgctttttcacccttgcggcttgcataagggtcgccaacaacgacaagtttaatattacttcttaaggtacgtaattgtttgaacgcctgcaaaagcaacaggatgcctttatcaggcgaaattctcccggcatacaagagaacggtggcatcttccgcaatatttaattgctgacgaagattatcttgtgggtttcttttataagtctcagcacaaaaaccattaggcacaatactaacagcagcggcgggcaatctttcttcataaaacgctttaagaaactgactgggcacgataatttttgcatcattatcaggaagttctggttcaaatgcattatgcatgtgcataaccagttttgcattcggattgcgctctctgatctgccgatacagtttcatactattatgaataacaatgacgctatcttcctgggtagtcactttatctctaatattaaggatgcgctgggaatagggtagtgggtcgagacgagtccatttctgaaaaagacgcttataaactttactaaacccgatgtaatgaatatcacagttatcgtttattttattatattcaggatagccagcattctttatacaagcaatagcattcggtattgatagtcgttttgcaacctggtaaatccaggtttctaccgcagccgcaccacgaggaggaattgaaaatataggagtaacagtaaatatgatttttttaatcataatagctataatccagaatagttaactttatagaaaaagaaatgttataaaaaaaagaaatgcgtgccgaagcaacgaaaaataatgatttatctagtgtctagacaattttatcgtaatatatttcatcctcaagctccgaggctgtaatatatggaataatatcgtaatgaattgcagtatcatctgataaattaaagatatttaaatcactcacattttttctcataaaagtaaaaaatggcagtattttaaacagatctttactaagctcagatggcatagggctggtagattcgtcatagaaacgtgggcaactccctgttaagtcaagcccagaacatataatacggccatacttgagggaataggcaacctgaatagcggtataagcaatagtatggcaagagcaatacccgatgctgatatccttgcaaaatccagccagtcgccctcttttcgaaagaggaactgaaataagtaatgctttatgaacccgcttgaggatattaaatttaattttctttaaaaagccccctttttctcggcgataaaaggagcgaataattaaacagttttcttcaatatatttttgatcatccactgaagcctgttcgtacacatcaagattgacgatagtaaactgactgttacggctaaagttataaaaatcttcgcgccgacgatggaggaagcgaatatccgtcagaaggtacaaaaatggcttgacgttattgtttagcaaatattgaacagaaccattgactgcaatgacatctttcattcgtaacaaggacagcggcgtctttctggacgtaggaccagaaagaaaaataatacaatcttcagccgttcttttcgcaataagttgcagaacatcggcgtgagttatgaagttaacgctgcccataaaaaactcgtatgtttatcatgcaacctataaataaatgttatattcaataactaatattacatctcaaattctctcaagtatgtcataacgctgcagcaaataaaagtcagtcagccccttaaattaaaccaaacgtgctacattgatcagcgtttttccttacccttaatacgacgcaagaaatttcggagttttttcttataaatcaataagtaaaatccgatatctctcacattatttttgataccataatgtctttctaaatcaatacgatcctttgcttttcgttgtctggaaggtctttttccggacaaatcgataattctgatctcattgccttgcaggataaagttacctttatggggatcgcccgaaaccataccatgctgatgcagagaatatatcgactgtttgattttccctctcacctcgtcagaaatttctggcatatcaacaagttcaataccttcaatatactcaattatcatcacgtatgtttttacatagcgtaatgttttaatttccgccagcaggtaaaaatcattaagcgccgcaaacccttcacgccgcacacgatctgtctgatgaaaaagcttttcgtagtaatctccttttactaacgatttgaaaaagcgttcagtattttttacttttggactaaatactttgagaatatattttccgtagtctgtattaatcaatacaacttttgtatcttctatattacggaagactttaataacctgatgattataagatagaaaatctttgaatatctcaatgtatttttcaccgtcttttttgacaaagacggtatagtttttaatctttttttcaataatcataatggagatttagggaggggaattatttgtggaaaagtttacgataaagatatgcgcttccagccagaaggcctttaaaataatgaccttgcacgagaagatgtttatatcgcttcttaaattcgactatggtacgcgcatcttttgcgggaaaatctttccagggcgagttcagtcgtgcatttttataatagataactgaaggataatttgcccaggcatgccatggttttgtagcgcccgtataatgaattaaaatagtattatcattaattatattgctatattttttatgtgacttatctttcaactcacttttaatagtataaatagtattatacggtcgcggtagaaaaatgactttatcctgtaggagaatattcaaaacatcctgatcgggatatttaaaagagtcagcctctttacctgccaaaagtaaaaatgcctttttggttaaggcattctctttccataatttcaggttaacaaaaaccacgccggagttaaaataaccaccttgtaaattaaaagcgcttaatctctcatttaccttattctggatggaatcaacatcttttacgaccgcagcgatcttctctgtcagatcaagctgtaaaagatcttgcaaagatcctttgcatacaacatcggcatccaaataaagtaaggtatttaccttcttgctgagataatcgaaagcaaataaacgaaaatacattgctctcgaccatactttagtttgaggcaatacctcaaggctttctactttaataagataaagagaaatttttatgtgatgctgtacggctaaacgctctatatattttacaaaacacggggagtatgagtcacaaataatgtgaaaagcgagcgggatattattgtttaatacaactgaagcgattgatacccccacaccatcaagatagttttcatcaacgccataagaaatgtttaatacgttatcatcattattattactttcatcaaaaactttatattcagctatttctatctcaggaaatgaatccattacatcacctatgggttttattcaagaagtttacgtttaaagtaggctatataataatttatacccgaagtataatgcttctgattaaacatatgctttgccgcataacgtaactgatggctagtcactggatttaaaagtgcacaatgagaccatggtgagttgctcttagcctgtaaaaaatattgtgacacggggtaagccccccaactatgccagggcttcgttggtccgatataatgaacaaatacagtctcagcatcaactggattaataactgaatcttttaattcatagttaagactaaattgtgtattaaattttttatcaacaaaacgcgctttattcactaaaaatatatttaatacatcctgatcaaggtgcgttatgcgctgtactacctctggatcttttagcatttcaatcgctttcttagagatattttctgcagtccaaagaggtatgttaattaaaataaaaccggcattaaaatagccagaaaccagcccaggcgttgccaggctaaccgagcgcttagtccaccattccaactcgccttcagcaacgacagccgcaatctcattttcagcaaaattaagatcaataagttcctgaatactccccttacatgcaatatctgcatccagataaagtactctatctgttttatctgaaaaataatcggcgataatgaatctaaagtatgttgcataggtccagtttttggtactgggtagcgattttaagcgctcacagtcgattaggtaaacaacaatctgcgtagcgtactgttttgctaatgcctcaaatcgctgctggtcttcagagtcaaagaaatcggtaaaaacatggaaagctaacgccttctctggattagcgaggagaaccgatgcaatagagacaccacagccaaaaagaaagtttttatcaatcccataagctatattaaatttatcagcatcactatgttgtgcatagttataatctaaagtctgttgaatgacttcttcttcaaaatattttctgctcatagtgatcacttttgtaatttcgagaatattgcattattaaaatttttaaaatatagcacatcgtaaaatctctcaatcgtgccgggaataatatcatgctgatattttacttcaccagaaataacgcgattaaggtgtcctacaaaatcatctatagcacccggagtgtaaagctcaccattcaaaccgggtttaatcatatcgcgcggaccagacatacaatcagaactaatacacggaattccatatgacattgcttccagcagggtcataggaaatccctcaaatgcagaggtaagtagtaacgcggtgacattttttattttttgctgtacgacttgccacggcgcgctttgccaaccataccagatcacacgctgctcaataccaagctcccgactataggcctggcacttttcaaaatctgagccatcaccaataatatgtagctgccattcccctgtcgtacgagctaagccatcaaataaatctttaactcttttctgcccttcaaatttaagacgccctacatagagaaatacagctggtttatcgcgctcaggcggcggcacaatgactgttttaatagagacaggattataaacgacgctaatatcttgcgctgagataccccgtgccatgatctgttctttaataccactactgatggccagatgataatccgcgtacgttatacattctgcatgttttttatggtcgagcgaaaaatgcggccacgagaaaatagtaaaatgtttaccacttttctttcgtgctttattggcataaagacatgagatgacatcaatacatatcacaatatccggtgacgtttctttcagccactgactaaaattataaacatgcttagctcgacgaagaaaacttaattttatatttgagaatgattgcgcatatttaatctcttttagccatgctttatccattttgtcattacgacaaaagaaaaacatttcacagttgatcttcggagagctattttcaaacgtatggataacgttgctaataacggtttccatccctccaaaaccggataccgcttcgccaataaaagctattttcatatataccccagagttaaaaccttaatctaaagactttagatattaaatagcaaaaatagtaatataaccctatagagtaatttttacctgacatctctctttttgctttaaggcgtagtcaatatctttattattttcgataatggaatatattgccacacctgctggcattataaaaccatgatcaaagcaaagagcaatgtccagtcttcttccaaaaaaatcatcatgttgaattatgtttttttggtttgaaatataacttttaatgttagacattctgtctatccttgtctcactcataaattactcactgagtgcataattattataattacagattttttcttattgtcctttctttaattcgagcggctttaacatctgcctgatgaatcaaccccgattctttttgcaaaatctctcgcagggggagagagaaatactcacgcataaaccggaatatatctcgctgagtcaggccaatattcattgaagaaaaataaagcccaattaaatctttgtcacgccagcgaaggggaacgtgctggcgtatctgcgcgcgatgcaggtcaattacggagatttttaaatcctcttcgcgaccagtgaaaggtaaatgcagaagaaagtggcaaatataacagtcgcgatggttaattcccccggcgtgcattttacgtaccatagtcgcaacacgcttaatgatcatccacttcacctgcgcgtccggtggattaacagcccagtcagcacagtagtcttcaaggctaatggtgggcgttaaatcttcggtgataataaatgatgttctggttagcgggtttacgcctttttcaccaaaaccaacgccgtgcatcgtatcaacgcccagctcatgtagacgatgaatggcgtgccattctctgtcagcgcccagaacaggcatacgtaacgaaatcaggttcttcacaatttctttcagcgaagtacctttatgccacttcaggaagtagcttttaccgtccagctcaaaccgcaatgttcgacgcgtctccagctctctgaacacttcgccctgtaacgtttttacttcctcaaaagcatctttaccgcgccatagtgtggttaacggcgctttcagctcaaccatctaaatcacctgtaataatatccgcggccttctccggtaagctgtataaatcctgggtatcagcataataccgcgcattttcagcccaggcgttgcgtaaggaaggctgtgtcagcgctttgagtaaaacctcatttagcgcatcctggcggaatggttcagtcatcgcttcgccacagtttgcatccacaatataatgtgcataaccgcacaccgcggttgtcagcaccggcaaaccagcagtaatggcttccagcaaaacaataccagcagcttcctgataggctggatgcagtaaaaggtcggctgccgccattaactccgcgatatcattacgtccggagaaaaaatgcacattcgtgccgacgccgcttctttcagccagtgctgcaaacttcttcggcttatcctgcccgacaacatagagcaccgtattttgccgtaaagattcgggtagcgatgccagcgcttcaatagagcgatccacacctttacgggtaaagtcagaccctacttgcaacagtaatttttgctgttctgagataccatttttctgacgataaatttgacgactgtttgggatctgttggctatattttctgtccgggtaaatccccggaggaagaatatggaaacgctccgcttcagtctgataatgtttttggaagtcagcaatctgcttattcgtcagcattaatagttgcgtcggcttgccgtgttcaaacgtggcgcgttcaaaagcagcataatgccgatagcgtgatgtcaggcgatagaaaaatcctttttcctgtgcgactttttcggcgtaacacacgtctgcggcgtaatacacatcaaggcccggcatcttattgaatccaaccacccgatcgacagggtggtcgcgcaaatggtgttgcacccaggcataatattctgcgttacgaccgtggttcgtccgggatttaaccggcacgcggattaattcaaagttatccgggcattccccttcccatgactgagtataaacacgaacctgatgccctcgcgccgccacggtttgggcaatgcgcataaaatcacgctgcagaccgccaaaaggaaaatatttatataagcaaaaggcaactctcatagcaggctgtccaaatctatggtgcgtgcctcatgcggcagcattttttccgtcgcggcgataacatcttcagccggaataacggaaaggtattttttattacgatcaagctcatgccgttcaggcatcggctgataatttcctgcccaaaactgaatgatgtcgtcggtccagggacgccagaatacatgatccgtcgcgccaaaaagacaaatgaccggcgttttgactgctgcggcaatatgaccgggggccgaatcaacgccgataaagagatccgcatggtcaatcaacgcacccaattcaggaaagcgagttttacccgccagaccagtaaccggttttgtctcacagccgcgtgcaatagcatccacgcaggccatctcgtctgcggccgggcctgacgtcagtacaacttgataaccgcggcgctgcacggcatcaataacctgcgagaatttatcattatcccagcacttaaatagctgccgtgccgtaggctgaataacaacatattgtcgggtcacaccaagttgtttgagctgttgtcgcatgttttcccaatgttccgggcgatagctcatggtggtttccgtgacatactgttttagcgctaacggctttagcgcggataatgtgcgctcaacagcatgttctcccgcataaggtactaaatgcgtaaagctctttttccatagagcagactgacgattaccgaaatcctgcgagatttttatttttgcgtttaaaaaacgcacaataagcgccacgctccactgatcggtgagattgacgaccagatcatacgagttagcacgcaattttttgattagcgatagcgcgtttttgatcttctcttttgttcctgcgcctttgttactgatgccgtagagtgcattaatctccggattttccgacaatatcggtatggtgttctggtaaagaagcacatcgatttttgcatcgggataattctgcttcagcgtgctgatgacaggggtggtaagtaacatgtctccatgaaaacgcatttttataatcagaattcttcgaaatggcttttccacaagcgactctttggttgaaattgtccggataaataagcagaaaaaagcacgctaccgccccaggcttcacagcaacccgatggctaataccgcactcattttagatgcgctagtgtaacacttctttcgcagcaatccgatacgaataatttttatacacaatcatttttttaatcataaattcaaagagataataatttatccccctcttgtgaatggtcattcccattgtctggggcgacaagggcggcaaatttcaatggattgcgtaaaaatgcaaaaataatggggttcagcgcctggaatcctcgcttctgagccaatttggcgcaaaaatgggaaaagtaatggtaaagcccaggctaaatacatagaatccccagcacatccataagtcagctatttactatgctcgaattgctttacaccgctcttctctaccttattcagcctctgatctggatacggctttgggtgcgtggacgtaaagcgccggcctatcgtaagcgctggggtgaacgctacggattctaccgccgtccgttgaaaccgggcggaatcatgctgcattccgtctcggtgggcgaaactctggcggccatcccattggtccgcgctctacgtcatcgctatcccgatctgcctattaccgtaacgaccatgacgccgaccggctcggagcgcgtccagtccgcctttggcaacgatgttcagcacgtttacttgccttatgatttgcccgatgcgctcaatcgtttcctcaataagattgatcctaagctggtattgatcatggagactgagctctggccaaatctgattgctgcgctgcacaaacgtcatattcccctggttatcgctaatgcgcggctttccgcccgctccgccgcgggttatgcgaagcttggcaagtttgtccgtacgctcttgcgccgtatcaccctgattgccgcgcaaaacgaagaagatggcgaacgctttgtggcattgggcgcgaagaacaatcaggtcacggtcaccggcagtctgaaatttgatatttcagttacgccgcagctggcggctaaagccgttacgctacgccgccagtgggcgccgcaccgtccggtctggattgccaccagcacccacgatggcgaagagagtatcgttatcgccgctcaccaggcgttattacatcaattcccgaatttattactgattctggtgccccgccatccggagcgtttcccggatgctatcaatcttgtgcgtcaggcagggttaagctacatcactcgttcttcgggcgaagtaccgtccgccagcacccaggtcgtggtaggcgataccatgggcgaattaatgttgctctatggcattgccgatctcgcctttgttggtggttcgctggttgaacgcggcggtcataacccgctggaggccgccgctcatgcgattccggtactgatgggtccgcatacctttaactttaaagatatttgcgcccgtctggatcaggcgagcggacttatcacgattaccgatgcggctacgctggcaaaagaagtttcctctttactgaccgacgctgattatcgtaatttctacggacgtcacgcagttgaagtgctgtatcaaaatcagggcgcgctccagcgtctgctgcaactgctggaaccttatctgccaccgaaaacgcattgaggactgtcatgcaaaaacgggcgatttatccaggtacgtttgatccgattactaacggtcatctcgatattgtgacgcgcgcaacgcagatgttcgaccatgtcattctggctatcgccgccagccccagcaagaaacccatgttcaccctggacgaacgtgtggcgctggcgcaaaaagcgaccgcacacctgggtaacgtagaggtggtaggctttagcgacctgatggccaatttcgcccgcgacagacaggcgaatatcctgattcgtggtctgcgcgcggtggcggattttgaatatgaaatgcagttggcgcatatgaatcgccatctgatgccgcaactggaaagcgttttcctgatgccgtccaaagagtggtcgtttatttcatcgtcgctggtcaaagaagtggcgcgccatcagggcgatgtgacccactttctgccggacaatgtgcatcaggcgctaatggataagttgaaataagtttcctaccttgccgggcctggcattttacttctgacagtgacggcaatagaacgtcgcgcgctgtgcgtgtttcgttgcgactatcggcgtaccgcatacccgacacggctcgcctttgcgcccgtacacctgcaactcctgggcaaaatagcccggcttcccatcgctttgcagaaaatccttcagcgttgtcccgccttgttcaatagagcgcagcaaaacggctttaatcacccgcgccagcaggtcgcactcctctgtcgagagtgacgacgccaggcggtcagggtgaataccagcggcaaacagcgactcgctggcgtagatattccccacgccgaccaccagcttgttatccatcagccagggtttaatcgccgtcttcttcttcgcgcatttctgctgcaaatattcgccattaaactcatcgcttagcggctccggtcccagatgcgccagtacgttatgcccttccagctctttggtccataaccaggcgccaaagcggcgaggatcggtataacgtagaattttgccgttgctcatcaccaaatcgacatggtcgtgcttttccgccggcagcgcttccggcagtatccgcaagcttcccgacatccccaggtgaataattatccagccgtcaggcagctccagcagtagatatttagcacgacgctgaacgctaaggacgggtgtatcgctcagacgataaatttcatctgaaaccggccagcgcagacggccgttacggatatgggcgtgcaggatagtagcgccaactaaatggggttcaataccccggcggctggtttcaacttcgggtaattcaggcataacgtctccggctgtgtggcaggtctcattaatatggggacggccagaaaacaaaaaaccccgccgaagcgaggtttttgttacatcaaagcgagaattatttgattttcgcttctttgtagatcacgtgctgacggacaactggatcgaattttttcagttccagtttttccggtttagtacgtttgttcttcgtagtggtatagaagtgaccagtaccagcagaagaaaccagcttgattttctcacgaatacctttagccatgatttatttcctcttagtacttagtacttttcgccacgggcacgcagttcagacagaactgtttcgatgccttttttatcgatgatacgcatacctttagcagatacacgcagggtgacaaaacgcttctcgctctcaacccagaaacggtgagagtgcaggttaggcaggaaacggcgtttagtcgcgttcagtgcgtgggaacggttgttaccggtcaccggacgcttgccagtaacttggcagactcgggacatgtctattctccaaaaatcaaattagctcgagcttcgtatggggtatcggcgcctcgtcaggctttacagcctggtcatcgcgcagttctattgaactctcgattgccaggcccaaatgccaaacccgagattctcaaaggtggcgtagtatacgctgacccggcgatatgctcaagtcccgaacagacaaagatcccgatggatcgcgcaaagaatcttaaatccagccgcgttcggcaaaagaaacgtactctccgcgcccaattatcaggtgatcgagcacccggatatccataaactggcaacactttatcacgcgctcagtgataagtttatctgctttacttggctctgcgcagcctgaagggtggttatgcgccagaatgaccgctgaagcattgagtttaatcgcttcccgaacaatctcacgcggatgcacctctacgtggttaagcgtgccggaaaacaggcggctgtgctgaagcacccggtgctgggcatcgaggaagatcaccagaaagatctcacgctcttcgcccgtcagttggctttgcagaaattcccgcgtcatttccggactcagcaacgcactttcctcattcatgcgcacgctgtaatagcgccttgccagctcagcaatgcctttcaactgcgcgaatttcgccaggccgatgccgtttacgccgcgaaactgcgcaaagtccgccgacagcaggccatacagcgacccaaagtgctgcaatatctcttttgccaacgtcataacatcttttcccggcgtgccggtacgtaaaaaaagcgccagcagctccacgtcgctgagggaagcaatgccggatctgagcattttttcacgcggcaataattcgtccaacgtatccatacgcgcacctccttttttaaggaagcggcatagtggcacagcctttgggagagatcgacgccccgattttgttcttgcgtagcgcctcgcaaagtggagcgcaggcaaagacacgacgccgtagagattgtgataaaatagccgcctttcaaagtcacccaacaggaaagacatgatgagcctggccggtaaaaaaattgttctcggcgttagcggcggtatcgctgcgtataaaacgccggagctggtgcgccgtttacgtgagcacggcgctgacgtgcgcgtggcaatgaccgaggcggcaaaagcctttattacccccctgagcttacaggcagtgtcgggctatcccgtatccgacagtctgcttgaccctgccgctgaagccgcgatggggcatatcgagttggggaaatgggccgacctggtgattcttgcccccgcgaccgccgacctgatcgcccgtgtagcatcgggtatggctaatgatttagtctccaccatttgcctggcgacgccagccccggtggccgtgcttccggccatgaaccaacagatgtaccgcgctgccgccacgcaacataatctggaggtgctcgcctctcgcggcctgttcatttgggggccggatagcggcagtcaggcgtgcggcgacgtaggcccaggccgaatgctggacccattagttatcgttgataaggccgccgcgcatttcgctgccgtcaacgatttgcgacatcttaatatcatgattacggcaggtccgacgcgcgaaccgctcgacccggtgcgttatatttccaaccacagctccggtaaaatgggcttcgctattgcggcggccgcagcgcgtcgcggcgcaaatgtcacgctggtctccggtcccgtttcgttaccgacgccgccttttgtaaaacgggttgatgtcataaccgcgctggacatggaagccgctgttcaggccgccgttcaacagcagcacattttcattagctgcgccgccgtggctgactatcgcgcagagactatcgccagtgaaaaaatcaaaaaacaggcggcgcaaggtgatgaattactaataaaaatggtcaaaaacccggacattgtcgccggggtggccgcactcagtgacaatcgaccctacgttgttgggtttgccgcggaaacgaataatgtggaagaatacgcccggcaaaaacgtatccgtaagaaccttgacctgatttgtgcaaatgatgtttctctttcaaatcagggatttaatagcgataaaaacgctttacaccttttctggcaggatggagataaagtcttaccgcttgagcggaaagaactcctgggccaattattactcgacgagatcgtgacccgttatgatgaaaaaaatcgacgttaagattctggacccgcgtgttggtcagcagtttccgctgccgacttatgctacttctggttctgccgggcttgacctgcgcgcctgtctcgacgacgccgtagaactggcgcctggcgcaacgacgttggtacctaccggactggccattcatatcgccgatccatcactggcggcagtcatgttgccgcgttcgggcctgggccataaacatggtatcgtgctgggcaacctggtcgggctgattgattccgattatcaggggcaactgatggtttcgatctggaaccgtggtcaggacagttttaccattgaaccgggcgaacgtatcgcgcaaatggtgtttgttccggtcgttcaggccgaatttaatctggtggaagcatttgacgccaccgaacgtggcgagggcggcttcggtcattctggccgtaagtaaattttacgcatccccataacgtcataatactgccgcaagcgctgagtttgcggttatagcgtgggtgctcgcctggcaagtgcttattttcaggggtattttgtaacatggcagaaaaacaaactgcgaaaaggaatcgtcgcgaagaaatacttcagtcactggcgctgatgcttgaatccagcgatggaagccaacgcatcacgacggcaaaactggcggcctcggtcggcgtttcagaagcggcgctataccgccattttcccagcaagacccgcatgttcgatagcctgattgagtttatcgaagatagtctgattacccgtatcaatctgattttaaaagatgaaaaaaacaccagcacgcgtttgcgcctgattgtgttgctgattctgggttttggcgaacgcaaccctggcctgacgcgcattcttaccgggcacgcgctgatgtttgaacaggatcgcctgcaggggcgcattaatcagctttttgaacgcatcgaagcgcagctccgccaggtgctacgagaaaaaagaatgcgtgaaggcgaaggctacacgacggatgaaaatctgctggcaagccaactgttagccttctgtgaaggtatgctttcacggttcgtgcgtagcgaatttaaataccgcccaacggacgatttcgacgcccgctggccgctcattgccgctcagctacagtaacgctgactggatagtggctcacgccttatccaggcgacagaaacataggcccggtaaagcgccaccgggcaattcgcttacacgccaaattcttcccggtatgctcgcacagccgccagatgctcagccatatcaggtttttcttccagataggcaatcaggtctttcagcgtaatgatggagataaccttacaaccatagtcgcgctccacttcctgaatcgcggaaatctcgccgcggccacgttcctgacgatccagcgaaatcagtacgccagccagcgtagccccgtgcgcctgaataatctccattgactcgcgaatcgccgtacctgcggtaatcacgtcatccaccagcatcacgcggccctgtagcgcgctgcccaccaggctcccgccttcaccatgatcttttgcctctttgcggttaaagcagtacggcaggtctttatcgtgatgttccgccagcgcaaccgccgtcgtcgtcgcgatcggaatacctttgtacgcggggccaaacagcagatcaaattcaataccggaatccaccagcgcttcggcataaaaacggcctaacaacgccaggtcgcgcccggtattaaacagcccggcgttgaagaaataggggcttttgcgcccggatttcagcgtaaactcgccaaactttagtacctgcttgttaagcgcaaactcaataaactggcgctgatacggtttcatggattcgctccttttcttactttcatcatttacgaaatttacggacaaaaaaaaggcgacttttcagtcgccttaaaatcaattttctaacgccgccttctgcgtcgccacaatggattcaattccccctcgggccagcgccaacaaagtgagaagttcttcatggctgaacggctcgccttccgcggtaccctgtacttcaataatacggccgtcttcagtcatcacgacgttcatgtcggtttctgctgcggaatcttcaacatattccagatcgcagatcgcttcgccgttaacgatgcctacggaaaccgccgccaccatgcctttcatcggattggttttcagcttaccgttggcaaccaatttattcagcgcatccgccaacgccacgcaggcaccggtaatagacgctgtacgcgtaccgccatcggcctggattacatcgcagtccagcgtaatggtaaattcgccgagcgttttcagatcgaccgccgcacgcagcgcacgcgcgatcaaacgctgaatttccatagtacggccgccctgcttaccctttgccgcttcgcgcgcgttacgggtatgggtagcgcgaggcaacatgccatactctgcggtgatccacccctggccttgtcctttcagaaaacgtggaacgccctcttcaatggaggcagtgcacaacactttagtatctccaaattcgaccagtaccgagccttcagcgtgttttgtatagttacgggtcagggttacgggacgcacctgattagcgctacggcctgctggacgcatattgagatctccggcttaaaacgaatgtggctgcgcattatacggacttccgatggttattcctatcctgacaaggcctggatagctataatcccctcatctctcctttaaaaacgggaacatctatgatccgcagtatgaccgcctacgcccggcgtgaaatcaagggtgaatggggtagcgcgacctgggaaatgcgctcggtaaaccagcgttatctggaaacttactttcgtctgccggaacagttccgtagtcttgaacccgtcgtgcgcgaacgcattcgtacacgcctgacgcgcggcaaagtcgaatgtatgctgcgttttgaacccgatgccagcgcgcaaggcgagcttattctgaatgaaaagctagcgaaacaattagttagcgccgcaaactgggtcaaaatgcagagcgacgaaggggaaatcaatccggttgatattttgcgctggccaggtgtcatggcggcgcaagagcaggatctggacgcgattgccgcagaaattttagccgcactggacggtacgctggatgactttatcgtcgcgcgcgaaacggaaggccaggcgctgaaagcgctgattgaacaacggctggaaggcgtcagcgccgaagtagcgaaagtccgcgcgcatatgccggaaatcctgcaatggcagcgtgagcgcctggtcgcgaagctggaagatgctcaggttcagttggaaaacaaccgtctggagcaagagctggtgatgatggcgcaacgcattgatgtggcggaagagctggatcgtctggaagcgcacgtcaaagagacttacaacattctgaagaaaaaagaggcggtaggtcgccgtctggacttcatgatgcaagaatttaaccgtgagtcgaacaccctggcctccaaatccatcaacgctgatgtaactaactccgctattgaattaaaagtgttgatcgagcaaatgcgcgagcaaatccagaatattgaataattctggcgctcaatatgtcacagagcccgccttatgcgggctctcgcgtttatcggtagtacgtttttaatttccggcgaatagcgtcgataaggcgtcgcttccactctaccgttgaagcccgatactgcataaaaatagcgccttccgcctgctccccggcaagcggcaggacaaaaagaccgcgcttatcggataaattttcataccaggggcgcggtacaatcgccattagcggcgccgactggacagcaggcgcaagttgactgtaatcatgacaaacaaacgccagcggacgttcaaacccggcacgagcctgctgcctgtccagttcgttgttctcttttgtccacggcaaacagtaaatgtgttgataatgctgtagatcagcaaaattcaacgctgtggcattctccagacgtgaacgcaatggcgcgccataaaccgcgatcaaacgcgtagtccccacccgctcgtaatgcagagcgctgacctgcttttgatggtcgccaattgccagcaccaaatcaaccgagctatccaacagttcatcacgccagggtcggcgggcaaaaggaaggcactcgatcaccgcctgatgaagatgacctttctctgcgagaactggcgtaagcagcgcgttcaatgcgggaggaagtaccacccgaaaacaacgggagccgttctctttatcgccaaacagctcctcattaagcgaaacaaacacaggcgccaatttgtcacgcagcgcctgcgcataaggcgtaggaatctggcggttcccttcccgtcgaaacaacgggtcgtttagcgcatcgcgcaatctcattaacgcatgacttaccgcagaaggcgacaaagccagcttttgcgccgttttccccgtagagctcgtctccagcagcacatacagtacttttaacaggttcatatccatttgcagcaagttcattaaacgtctctcttattgaacctggctaaattactgccaggtatactgcgggcgcttcaatcaggagaacattatgaatcgctatgcattattccttgtatgtatattttcaacatcagcacttcctgccatggcggcattagatccttcacaaccgttatcacccgcgcctccgttatcactgtttaaagcgtgggctaagcctataaagccgtttcaaatcacagaaggcgtgtggtatgtcggtacgaaaaatctctcttctattctgctgaccactccggcagggcatattcttattgatgcggggttggatgaaagcgcaccgcaaattaaagcgaatattgaagcggcaggattccgcctcacagacgtgcgctatctgttgaatagccatgcgcggctggatcaagcggggggcatggcacgtttgaaagcgtggagcggcgcacaattggtcgccagccaacccaacgccgatcagatggcgaggggtggacgacaggattttgcgcttggcgatgcgctcccctttccgcccgtcaccaccgataaaattatccaccaccaggaaagcatcatcctcggagggataaccgtgacagcactattcacgcctggacatctgcccggctcaacttcctggcgcgtaacgctccgcaacggcaagacgctaatttacgcagatagtctcgccacgcccgactatctgctgattaacaacaaaaattaccctgacctggttactgatattcagagcagctttaagacactggccgcccagcatgttgatatctttattgccaacaaaggtgaccgcttcgggctactggagaaacgacagcaacttcgcaacggcgatacacaggcattctttgattccaatggcttgcaacagtatgtggaacgctcgcgccagcgcttcatcacacaacttaccgcacagcagccataatgaaataactcaccggcggcgcgtccagggcgccgttcttttaaattatctaagtcaaaatagaaaaacctcgcatacaataaaccacaaaaatgatgttcaatttattgatatttataataaataattattaattataaatttaaaatcattactaaaatttattaatcgtgtaatgccttagaaaatctcaatcgtgatacagcgcacaaatcgttaatcttcgcccccagtaaattagggggaaatcatgctgttgcacgttctttatttaattggcatcactgccgaggccatgacgggcgcactcgctgcgggtcgtcgtcgcatggatacattcggcgtaattattattgctaccgccaccgccattggtggaggctcagttcgcgacattctgctcggtcactatccgctgggttgggtgaagcatcccgaatatgtcattattgtggcgactgccgctgtattgaccaccattgttgcccccgtcatgccctatttacgcaagcttttcctggtacttgacgcgctggggttggtggttttctctattattggcgctcagatagcccttgatatgggcgaagggccaattatcgccgtggtggccgccgtcactactggcgtctttggcggcgtgctccgcgatatgttctgcaaacgcattccactggtgtttcaaaaagagctatatgccggcatttcgttcgcctcggcggtgctctatattgcgctgcaacattacgtcatgaatccggatgtcgtcgttatctctacgctactgtttggctttacagcaaggttattagcgctacgtcttaaacttggcctgccggtattttattaccgccatgaagggcactaagacccaaatccgggaatatgctgagcagccagccatctgctcagcgctttgatctgcagattattccgccagtcgatgactctcccggcacgacgctcgcccgtcgctggtaactgccgccagtgttgctctgttcgcattaataactgctcccatgaacgatcgccgctggcctgtaatgcagcctgcgttaaggggatatccatcgccatgatccagcgggtaaacggctgccggcgcgccaggttaaattgccgccatatctgctcgctttttcctttagcaaagcctggcgtgttggctatttgcgctgacgtcagggtaagccaggagaagatatgctcaaagcgatgcgtctgatgcaaggcccgccagctggcttcacccattccgtccagacccaacgccgaccgtgaccccagccatatcagcctggagataaactgttcctgacacgttgccgacgcgtaaaagcaggtcagcgagttgaaatggctatcaggcggtacaggcttactccgctcacgactccgccagacgacctcatcaagccggggaatgccttgcccggccagactcaccaggatctgatcgcccggcgcgatatcccacgcttcccaacgtttcacagaaccgatattgacccgctgaacccgcttatcatccaatataacggggacaagcgacgctactacggtaattttgccgcttttccccaccgagaactgaatagcgctcacttgcgcgacctgcgctactggcggatatttccatgctgccagccagtcgccctgcccgggtcgccagtgttgtgacgcaggttctttagccatgcgtatcactacgccatccgttacaaagggtaatgctgacgtcagccatgactggcgcgcccgctcgacctcgctggcatcttttaccgccagggtatatttattcgtcagactgaatccagccttagcaagttggcttaatctttcgggcatatttgccggaccgtccggccacgcccaaataaaaatacccaacgaatttagcgcggaggcgttatcctggcgcattaacattcctgcgactttcgagcgcgcattcatcccgcccatccgttgctggatatgtccctcgcgctgtagaaagatttcgccctgtaacaccgcgttagcaagcgcgccttgtgttgtctgcggtatagaggggatcaggcgaatttttggcgtccagtcctcgccttgtagtccgttaccccggctaatggccctggtcagtttaccgttttgataaaccagtgttaccgctacgccatccacttttggctgtacccaaagctcgctgcgcccgcgcatccactgttctaccgcctgtcggtccgcgagtttacgtacgcccgtgtgcgcaacagggtgcattgttgtaccgtttaacggcggtgaaaccggagtagatgaaacatcctgaccaacacagcgttgccactgaaccagccttgcgctgagttggtcgtacacactatcgtcaaccgcgctaaccccttgtttccagtagatgtcattccagtcagcgagctgttgctgtaaacgggcgatttcttcagcggcccttgctggcggccaggccgggcaaagcgccccactctgcgaatgccacaataaaattccccacgccatacttttccataatctcatcacgacctcctgcgcacattgcccggcaggtatagcgctttagtgaataaaaaccgacaggtaaaaatgcatcatccgagccgctttccagattttttggtgggttgctgcaacgacgcgataaaagcggaaaaagggacgcaaaatgcaataatctggcgcaaaaagtgtgacaaagactacgtcgcataacggcgatgtgtataataagcccgtatcaaggctctatttcgataatcacagacgtaagatactcatggctcaaggtacgctttatattgtttctgcccccagtggcgcgggtaaatccagcctgattcaggctttattaaaaacccaaccgttgtatgacactcaggtttccgtttcacataccacgcgcgcgccgcgtccgggtgaagtgcacggtgagcactatttctttgtaaatcatgatgagtttaaaaccatgattggcagggaggcgtttctggagcacgcggaagtgtttggcaattactacggcacttcgcgcgaaaccattgagcaagtgctggcaaccggcgttgatgtttttctggatatcgactggcagggcgcccagcaaattcgcgaaaagatgccgcaagcacgcagcatttttattttgccgccgtcaaagatcgaattggatcgccgtttacgcggccgcgggcaagatagcgaagaagtcattgccaaacgaatggcgcaagcggttgcagaaatgagccattacgccgaatatgattatcttattgtgaatgacgactttgataccgcgttaagcgacttgaaaaccatcattcgcgctgaacgtctgcgtatgagccgccaaaagcagcgtcataacgctttaatcagcaaattgttggcagactgaacccactttcagtatcatgcccagtcatttcttcacctgtggagcattttaagtatggcacgcgtaactgttcaggacgctgtagagaaaattggtaaccgttttgacctggtactggtcgccgcgcgtcgcgctcgtcagatgcaggtaggcggaaaggatccgctggtaccggaagaaaacgataaaactaccgttatcgcgctgcgcgaaatcgaagaaggtctgattaacaaccagatcctcgacgtccgcgagcgccaggaacagcaagagcaggaagccgctgaattacaagccgttaccgctattgctgaaggtcgtcgttaatcacaaagcgggtcgcccttgtatctgtttgaaagcctgaatcaactgattcaaacctacctgccggaagaccagattaagcgtcttcggcaggcgtatctcgttgcacgtgacgctcacgagggccagacacgttcaagcggtgaaccctatatcacgcacccggtggcggtggcctgtattctggccgagatgaaactcgactacgaaacgctgatggccgctctgctgcatgacgtgattgaagatacccccgccacctatcaggacatggaacagcttttcggtaaaagcgttgccgagctggtagagggggtgtcgaaacttgataagctcaagtttcgcgataagaaagaggcgcaggccgaaaactttcgcaaaatgattatggcgatggtgcaggatatccgcgtcatcctcattaagcttgctgaccgtacccataacatgcgcacgctgggctcgttacgcccggataaacgtcgtcgtattgcccgtgaaacgctggaaatctacagtcctctggcgcaccgtttaggtattcatcacatcaaaaccgagctggaagagctgggttttgaagcgctgtatcccaatcgttaccgcgtcatcaaagaagtggtaaaagcggcgcgcggcaaccgtaaggagatgatccaaaaaatcctctctgaaatcgaaggacgtttgcaagaggcgggaattccgtgtcgcgttagcggtcgcgaaaaacatctttactcgatctactgcaaaatggtgctcaaagagcagcgttttcactcgatcatggacatttacgctttccgcgtcatcgttcatgactccgatacctgctatcgcgtactcggccagatgcacagtctctataagccgcgtccgggacgggtgaaagactatattgccattcccaaagcgaacggctatcagtctttgcacacctcaatgatcggcccgcacggcgttcctgttgaagtccagatccgtaccgaagatatggatcagatggcggaaatgggggtcgcggcgcactgggcgtataaagaacacggtgagaccagcaccacggcgcagatccgcgcccagcgctggatgcagagcctgctggagctacaacagagcgccggtagttcgtttgaatttatcgaaagcgtaaaatccgatctcttcccggatgagatttacgttttcaccccggaagggcgcattgtcgaactgcccgctggcgctacgccggtggattttgcctatgcagtgcataccgacatcggccacgcctgcgtcggcgcgcgtgtcgaccgccagccttatccgctgtcgcagccgcttagcagcggtcagaccgtcgaaattattaccgcgccgggcgcgcgtcccaacgccgcctggctgaactttgtcgtcagctctaaagcgcgcgctaaaattcgtcagttgctgaaaaacctcaaacgtgatgactccgtaagcctgggccgtcgtctgcttaaccatgccttaggcggtagtcgtaagctggcggaaattccgcaggaaaatattcagcgcgaattggatcgtatgaagctggcaacgcttgacgatctgctggcggaaatcggtctcggcaacgcgatgagcgtagtggtcgcgaaaaatctgcagcaaggcgaagccgtggtgccgaccgttgcgcaatcgaatcacggccacctgccgattaaaggcgcggatggcgtgcttatcacctttgcgaagtgttgtcgtccgatcccaggcgacccgatcatcgctcacgtcagcccaggtaaaggactggtgatccaccacgaatcctgccgtaatatccgtggataccagaaagagccagagaaatttatggcggtcgaatgggacaaagagacggagcaggaattcattaccgaaatcaaggtggaaatgtttaaccatcagggcgcgctggctaacctgacggcggcgattaataccaccacctccaatattcaaagcctgaatactgaagagaaagatggtcgcgtctatagtacctttattcgccttaccgcacgcgatcgcgtacatctggcgaatatcatgcgcaaaatccgcgtgatgccagacgtcattaaagtcacccgtaaccgaaactagcgctatgaatccaaaacgttatgcgcgtatatgcgaaatgctcgccaggcgtcagcctgatctcacggtctgcatggagcaagtccacaaacctcataacgtttctgcaatcattcgtaccgcagatgccgttggcgtccatgaagtccatgccatctggccaggtagccggatgcgcaccatggcttctgcggcggcgggcagcaacagttgggtacaggtgaaaactcaccgtaccattggcgatgcggtagcccatttgaaaagtcggggaatgcagattctggcaacccatctttctgataaggccgtagactttcgcgagattgattacacgcgcccgacctgtattctgatgggtcaggagaaaaccggtattactcaggaagcattagccctggcggatcgggatatcatcattccgatgatcggcatggtacagtcgctgaacgtttccgtcgcctccgcgctcattctttatgaagcccagcgccagcgacagaacgcgggcatgtatctgcgtgaaaatagcatgttgccggaagatgaacagcagcgcctgctgtttgagggtggttatccggtgctggcgaaagtcgctaaacgtaaaggtctgccttatcctcgcgtcaatcagcagggcgaaatcgacgccgatgctgactggtgggcgacgatgcaggcggcagggtaatcaccatgtcaggccgcttgttagacgctgttccgctcaattccctgacaggcgtcggcgcagcgcaaagcagtaaactggcgaaaattggcctgcacaccgtgcaggacctcctgctccacctccctctgcgttacgaagaccgcacccatctctaccccattggcgaactgctgcctggcatctacgccaccgttgaaggcgaagtgctgaactgcaatatcactttcggcggtcgtcggatgatgacctgccagattagcgacggttccggcattcttaccatgcgctttttcaattttaacgcagcgatgaaaaacagcctggcgacgggacgacgtgtgctggcctacggggaagcgaagcgcggcaagtatggcgcagagatgatccatccggaatatcgcctgcagggcgatctcagcacgccggaacttcaggaaacgctcacccccgtctatccgaccaccgagggcgtgaagcaagcgacactgcgcaagcttaccgatcaggcgctggagttgctcgacacctgcgccattgccgaactactgccgccggaactggcgcagggtatgatgagcctgccggaggcgctacgtaccttgcatcgcccgccgccgacgctccagctcgccgatttagaaaccggcaaacacccggcgcagcggcggcttattcttgaagagctactggcgcataatctcagtatgctggcgcttcgcgcaggcgcgcagcgctaccacgctcagccgctaagtaccaacaacatattgaaagacaagctgctggcgtcgttgccgtttaaacccaccagcgcgcaggcgcgggtggtagcagagatcgaacgtgatatggcgctggatgtgccgatgatgcgtctggttcagggcgacgtgggttccggtaaaacgttggttgcggcgcttgccgccttgcgcgctattgcccacggtaagcaggtggcgctgatggcgccgaccgaattgctggctgaacagcacgcaaataatttccgcaactggttcgaaccgttgggcgttgaagtgggttggctggccggtaagcaaaaaggtaaagcgcgtcaggcgcagcaagaggctattgccagcggtcaggtgcagatgattgtcggcacccacgctatcttccaggaacaggtgcagtttaacgggctggcgctggttattatcgatgagcagcaccgctttggcgtccaccagcggctggcattgtgggaaaaaggccagcagcagggctttcatccgcatcagttgattatgaccgcaacgcccattccgcgcaccctggcgatgactgcctacgccgatctcgatacctcggtgattgacgagctaccgccgggccgtacccctgtcactaccgttgcgattccggatacccgtcgccatgaaatcattgatcgtgtgcgcaacgcctgcacaaccgaaggccgtcaggcctactgggtctgtacgctgattgaagagtcagacctgctggaagcgcaggcagcggaagccacctgggaggagctcaagctggcgttaccggagttgaatatcggcctggtacacggccgcatgaagcccgccgaaaaacaggcggtgatgcaggcctttaagcagggcgaactgcatctgctggtcgccactacggtgattgaggtgggggtcgatgttcctaacgccagcctgatgattattgaaaacccggagcgactgggcctggcgcagttacaccagctcagagggcgcgttggccgtggcgcggtcgcatcgcactgcgtgctgctctataaatcgccgctgtcgaaaacggcgcagaagcgtttacaggtattgcgcgacagcaacgacggctttgtgattgcacaaaaagatttagagattcgcggcccgggggaattactgggcacgcgccagacgggtaacgccgaatttaaagtagctgatttgctgcgcgatcaagccatgatccccgaagttcagcgtattgcccgtcatattcacgaacgttatccacagcaggcacaagcgctgattgagcgctggatgccggaaaccgaacgttattccaacgcctaatcctattcgccgcgcgacagagccaacagaagatcctcaatctggatagcgataacgtcctgggctgccagggcatcgcgcgagatacgcgttgccatcgcactctccggctcgtcccgcagcatttccgccgccttctgcaccccgtcgaggatcatctccgacgttaactgccgggttaaaaacgccagattattttccaaccacggttcttccgtcgcacctaatggcggttgccactgccacgagccttctggccaaagcgggttaacctctaccggataaattaaatgtgcggcgtactgcaacgcgcataccgctttacccggcgtatccagtaaccaccactgattccagagcgaacggataaacggcgcaatgccgccgagaacattgaaggtatccagccaggtcagcggagagttgaaaccgcgctcgtgattgattcgcgccagcatggtctccagcaaaaaatgccgtacctgctgacgctgagcggcatccatcatttcccgccagagataaggccgccgtaacgcacgcaggaaagactcctcgaagtgatcgccatagccatgggttaacagcgtttcgcgccaacaggcaaggcacagcggaaacagataacgaaacaattccggctgcatcggttcgtggtaaaccagattcagcacataataaacgctcagatgccaatcggtaatctgccgccagtccgtcgccgccagcgcctgcaactcagcatcggcatagtcaaactccgcttcccacacgttaagaaccggcggctcatcgccaaaaatatgacggcagcgttcacgcagggtttcaggttgacggcaacgttttttcatctttatccggcaaacattggcagcatcaggtacagcttgatcaccaacgcattgacgatatcgataaagaacgcgccgaccatcggcaccaccaggaacgccatatgcgaggggccaaaacggtcggtaatcgcctgcatattagcaatggcggtcggcgttgcgccaaggccaaaaccgcagtgacccgccgccagcaccgccgcatcatagtttttccccatcatgcgccaggtgacgaagatcgcgtacagcgccatgaagatggtctgtaccaccagaatcgccagcatcggcagcgccagtgacgccagttcccacagcttcaggctcatcagcgccattgccagaaacagtgacaaactcacgttccccagcaccgaaacagcacgctcaaatacgcgataaaaacccaccagcgccaggccattgctgaggatcaccccaacaaatagcacacaaacgaagaccggcagttcaagcaccgttcccgccagtagctgcgctacgattttgcccacggtcaaacagatagcaatcagggcgatggtttcgattagcaccagagaggtgatcatacggcccacatccggcttttcaaaggctgtcggcacggcctgatcgtcaggcattccatccggcgtggtggagtgtttcaccagataacgcgctaccgggccgccaatcaacccgcccagcaccaggccaaaggttgcacatgccatcgcaacttcggtggcactggcaaaaccataacgttcgacaaacagtttactccacgccgcgccggtaccgtgtccgccggacagcgtaattgacccggcaatcagccccattaacgggtccagccccaacagactcgccatgccgataccgatggcattctgcatcagcagtaatccgaccacgacgaccaggaagacgccaacaacgcgtccccccttgcgcaggctggcaaggttagcgttaaggccgatcgtcgcgaaaaacgccagcatcaacggatcgcgcagggtcatatcaaagttgacctcccaaccgacgctttttttcagtaccagcagagcaaccgcgaccagtaatccccccgccaccggttccggaatcgtatatttcttcaataaggagacagactggaccagcttgcgacccagtagcagcaccagcgtggcggcgacaagggtcgataaggtatcgagttcaaacatttaaagctcctgtagtgcgctgtgacatgtgcgcacaaatcatttcctgagtcagttttttagctctttgcgagtcttcggcatggattttaagcagaaaaaggcaaaaagttatataaaaaggtgcatttatcttttttaaatattaagaatattcgctcgcaatcgtttgcttttaccatctggtcagataaaatcaccgcttttccaccacgagaatgtccctgatgtccgttaacgccatcgagccggcagatgcgcaaccggttgcgcagacgcaaaacagcgaattaatttaccgtcttgaagatcgcccgccgctccctcaaaccctttttgccgcttgtcagcatctgctggccatgtttgtcgcggtaatcacgccagcgctgttaatctgccaggcgttgggtttaccggcgcaggatacgcagcacattatcagcatgtcgctgttcgcctccggcgtagcctctattattcaaatcaaagcgtgggggccggtaggatcggggctgttatccatccagggaaccagttttaactttgtcgccccgctgattatgggcggtaccgcgctgaaaaccggcggcgcggacgtcccgacgatgatggcggcgctgttcggcacgctgatgctggcaagctgcaccgagatggtgctttctcgcattctacatctggcgcgccggattatcacgccgttagtctccggcgtcgtggtgatgattattggcctgtcgctgattcaggtggggctaacttccatcggcggcggctatgccgccatgagcgacaacacctttggcgcaccgaaaaacctgttactggccggcgtcgtcctggccattatcatcctgctgaatcggcagcgtaatccctacctgcgcgtggcttctttggttattgccatggcggcaggctatcttttggcctggtttatgggcatgttgcctgagaataacgcgccggtctcacaggacatcctgatggtgccgaccccgctgtattatggtctgggcattgactggaacctgttactgccgttgatgctggtctttatgattacgtcgctggagaccatcggcgacatcaccgccacctctgatgtctccgagcagccggtatccggccccttgtacatgaaacggctaaagggcggcgtactggctaacggcctgaactcatttgtttcagcggtatttaatacgttcccgaattcctgtttcggtcagaacaacggcgtcattcagttgaccggcgtcgccagtcgctatgtgggatttgtcgtcgcgctgatgctgattgtactcggcctgttcccggcggtaagcggttttgtgcagcatatcccggaaccggtgctcggcggcgccacgttggtgatgttcggcaccattgccgcctccggggtgcgtattgtctcgcgtgagccactgaaccgccgcgcgattctgattatcgccctgtcgctggccgtgggtcttggcgtctcgcaacagccgcagatcctgcagttcgcgccggaatgggtgaaaaatctgctctcatccggaattgccgctggcggcatcacggctatcgtgctgaacctgattctcccgccggaaaaaccgtaaaaaccctgcggcggcgacacgattcgccgctgctgtaacgctctttcaccattcctgtcttgaggattgcacgcaaatcgtgcataaatcccctatgtgcatttcacgggatggaagaccatgaaattgattgggaggttgcttctctacgtgttgatcgcctgtttagtggtgattttcggcttttattttctgctgcaaacgcgctggggcgcagatcatgtcagcaactgggtatcagagaacagcggttatcacctcacattcgacgtgatggatcatcgtttttccgccccatcccatcttttactggagaatgtgacctttggtcgtgatggtcagcctgctaccctggtcgcgaaaaccgtagatatcggtctgagcattcgccagttaaccgcgccgctgcatgtcgacacgattctgttacaggacggcacgctgaatatttcagtgcaaaccgcccctttcccgtttgaggccgaccgcctgcaacttcgcaatatggcgctcaatagccccggtagcgaatggcgattgagcgcccagcgcgttaacggcggcgttatgccctggcgccccgaggccggtcgggtattgggcaataaagcccagatccaactgagcgctggttcgctgacgttaaacgacgttcccgccacgaatgtgcttattgaaggcagtatcgaccataatcaggtgatgttaaacaccgtcggcgccgatatggcgcgcggagcgttaaccggcgtcgcccggcgtaacgctgatggtagttgggtcgttgaaaatctgcggctgaatgatattcggttacaaagcgataaatccctgagcgagtttttcgcgccgcttactacggttccatctttgcagattagtcgtcttgaagtgacggactccagcctgcaaggaccagactgggcagtcaccgatcttgacctgagtttgcgcaatctgactctgcgcaaagaagactggcaaagccaggaaggtaaattatcgatgaatgccagcgagtttatttacggctcactgcacttgctcgatccaatcctgaacgccgaattttcaccacagggcgttgcgctacgccagttcactacccgctgggaaggcggtatggtcagaacttccggcgcctggttacgcgaaggcaaagcgcttattctggacgataccgctatcgccgggctggagtatacgctgccggaaaactggaagcagttatggatgaagccgctgcccgactggttgaacagcctgacgctgaaaaaattcagcgccagccgcaatctggtgattgatatcgacccggccttcccgtggcaaatcaccgctctggacggctacggcgcaaacctggagctggtacaacatcatcaatggggcgtctggagcggcaatgcgaccctcaacgccgcagcggcaacctttaaccgtgtggacgtgcgccgcccgtcgctgtcgttgacggctaatgccagcacggtcaacatcagcgatctgagcgcgtttactggaaaagggatactggaagccactgccagcgtatcgcaactgccgcagcgtcagacgcaaatcagcctgaacggacgcggcgtaccaatggatgtgctacagcagtggggctggccggcattaccgattgctggcgatggcaatattcagctcacggccagcggcaatattcaggccgatgcgccgttgaaaccgacggtaaacgggcaattacacgcggtcaacgcacaaaagcagcagataacacagacgatgcaagcgggcgtggtgtccggcggggaagttacgtcaacggagccaacgctgtaattgagggcttgcccggtggcgatggcgcttaccgggcttacggttcttgctcatttgtaggccggataagcgcagctcacggcgccatccggcgattcagatttaaagcgtaatcaccacttcatttccctgcggggtgaccactacgcccagttcacttcccgcatatgagccgcatttggtaccgctaatctgcgtaatattacgcagacacagcgtccagttgcgcgccttgccttcgccgctcaccgtaatggtattgcctgtgcgtttcgcctgcagcgtaaagattgtcgaaccatccgtagcagggacttcgcagaccgcttcgcagccgtcatccagatggaataactggaaggccgtaccctcatgccaggcgtaatcgggcttctggctattgttgcccagcgccagtagtgtattgtcacgcacgtacactggcagactcaggaagtcatgctgctgtttatgccagcggctgccctgcacttcatcgttgcgccacaggtgcgtccagcggccttctggcaggtagaactccacgtcgcccgcttcactaaataccggcgctaccatgaccgcatctcccagcatgtactggcgatcaagataatcacacgccggatcgtccgggaactccagcatcatcgcccgcatcattggcgtaccggcttcgttggcacgcgccgcttcccgatacagatacggcatcatccggcacttctgttcagtgaagaagcgcaccacgtcacaggactcgtcgtcataggcccacggaacccggtaggatttgctaccgtgcaggcggctgtggctggagagcaagccgaatgcgcaccaccgcttgtagacatgcgccggcgcggtattctcgaatccgccaatatcatgactccagaagccaaaccctgacaggccgatggacagcccgccgcgcaggctttccgccatcgattcgtagttggcgtagcagtcgccgccccagtgcaccgggaactgttgcgcgcccaccgaggcggaacgggcgaacagcaccgcctcttcaacgccgacggtctctttcagcacgttccacaccagttcgttgtagatgtaggcataatggttgtgcattttctgtggatctgaaccatcaaaccactgcacatccgttggaatgcgttcgccgaagtcagttttgaagcagtccactcccatctccaccaggcccttcagcttgtcggcataccattcgcaggcttgcgggttggtgaagtcgtaaatcgccagtcccggctgccatttatcccactgccacaaggagccgtccgggcgttttagcaaatatcctttctctttcagctcctggaagaccggggatttctggccgatgtaggggttaatccacacgcagactttcagccctttcgctttcaggcggcgaatcatccctttcggatcggggaaagtcaccgggtcccattcaaaatcgcaccactggaaggccttcatccagaaacagtcgaagtggaagacgtgcagcggcagattgcgctcggccataccgtcgataaaactgttaacggtcgcttcgtcgtagttggtggtgaatgaggtggtcagccacaggccaaacgaccaggcgggcggcagcgccggacgacccgtaaattgggtatagcggttcagcacgtctttcggggtcgggccgtcgatgacgaagtattccagatactcgctctcgacgctgaactgaactttggagactttctcggagccaatttcaaacgacacgcactgcggatgattcaccagcacaccgtagccacggttggtgatatagaacgggatattcttgtacgattgctcggtgctggtgccgccgtcgcggttccaggtctccaccgtctgaccgttacgcaccagcgcggtaaagcgctcgccaagcccgtagacggtgtcgcccacgccgagatccagacgctcgaacatgtagttgcgcccgctattggtgtcctgcacatagccgttatttttcaactgactaccggtgatacgtacaccgttacgcagaaaatccagtgaccagatctcgcctttggtgacgcgcacgctcaggctgccgctcttgagttcggcaaattcggcgttgttctgcatctccacgttgatatcttgcaagacattgagcggataatgtgggccgttatccaaagcgccctggaagtgttccatccgtacacctatcactccttcctgcggcgagaaaaagcgtagggtaaacaacggggtatccagttgccaggttcgttcgcggacatcacgcggcgcggcatagatcaccatctcattcccgtgctgttcaacgtcgaacacctgaaccgggtgaatcaaattaaggccaggctggatcagccagtttccgtcgctaattttcatagtctgttcctttagttctgcaattctttatgggtaaattcttgttcattacggtgtgcgccctgcgccagttgttccagaatggttttcaggaacgggcttttcagggtgtagtagcgtttagcgatcgcggcgctcagcagataacagatggccgggacgatagtgaacagagcgatgatgatgctgatcgtggcgctgttttgcgttttcgccgccgcgtcgtaaccgccgcctgccagcatccagccaatcagcgccccgccgagggcaagacccagtttcagcacgaacaacgtgccggcaaaactgatccccgtcaggcgtttgccgttacaccattcgccatagtcgacggtgtcagacatcatcacccactggataggcgtgactaactggtgcaatacgccaatcacaaagataaagacgaacatagcgatcgtggcgtgcatcggtacgaagaacatcgccacgctgattactgcgagtaaagcattggtccaccagaaaacgctcactttgcatttccagtcggtcaacggttttgccagcgccgagccaatcaggttgccgacgcaataggtggtgaggaaggcgacaaacacgcccggtttgcccaatatccaggtgacgtaatacatcatcgccccgccgcgcacgcataccgccagaatattcaggatggtgagcaggccgactatgcgccactggtcgttgtgccagatatcacgcaggtcttcacgcatggaggtatgggtggcaggcgcttcaacgcgctctttggtggtaaagaagcagaacgccagcatcaggaacgccaccaccgagagcgccgcgatacccccctggaagcccagcgccttattctcgccgccaatcagtttcaccagaggcatcatcagtacggtagaaagcattccgcccgccgttgccagcacaaagcgccaggattgcagggagatacgctgcgttgggtcattggttattacaccccccaacgcgcagtaagggatgttgaccacagtgtacagaagggtgagcaacgtgtaggtgatggcggcataaatcattttgccgttcagactgagatccggcgtgctataagctagcacacaaacgataccaaacggcaacgcgccaaacagcacccagggtcggaatttgccccagcgagagcgggtgcggtcggccagcaggcccatacaagggtcggagatggcatcaagcgcacgcgccagtaaaaacatggtgccaacaaaaccagcgggaatgccgaaaatatcggtatagaagaacatcatatataacatgacgttatcaaagatgatgtggctggcggcatcgcccataccatagccaatcttctccttaacggagagaatttcacttttcattacgcatccttaacgctcacaacgctcactaataccggttacagtttttgtaaaccttccctgcgagcgtgaatattccgttatttggttatcaaattacgattcttgttttctgtgatcagggtagcgtcaaaaagtgtgatgaaatgtaactaatggattttatgggggtttatatgaaaccgatcatggcagaaggaaagggaagttaaaaaagcacgggaggggatgtggaaacgccaggaagtagctataatgcgcgcgcctccatgtagcaatcgaggcgcggaagatcgtcgtctccggtgaggcggctggacttcaaatccagttggggccgccagcggtcccgggcaggttcgactcctgtgatcttccgccaacatccttctctcatgcccaccattcgtcctctatttcgggacaaagtatttgcttattattaagactagttcttgcatataatacgaaaggaaaggtggatagagaaagtggaatattattttattaatcaccatttaccgattgctaaaaccgaacgtccatttattgtgggatatcgtctgcaaagaagggataaaagtacgccaggactaacgcgggcgggacttaactaatcaccaaacgaacttgtgggtcatacttacaggctcatcctttctcaaaagagatacgcttaccaggccaaaattatgagatcaacgtatagagccatccggataaagatacatgcctccctccagatacacgggttctccttcttctaccgctaaattatgatatagcgattgcatttcatcatctgcactttcttccggttggttttcaactcgataataggtatctacatcatagttctgtttacggagatcgtcgtcgctgtatacgccaagccgtttttttaagcctgttatattaaatatccattttaacccatctttaatataataggcatcaccataagcattttcatcggggcattctttatagcccatccgcaatgcaacatcacagccatgcttaccaacatatttataactcatatcccccccaatatgttgcttcaatatcccagataaaattcataacgaaaacctatcctgataacctatgccacatgaaggatacaatttaaactaaagtacgcgttatattatcccctaagtccgtatcaagtatgcgtattctgtagtaggtagtaatatgttctaatttattaatgtgagttatatatgaagagattatttacagcgatgattatcgcttttattaccgtcacggcatcatccagtgcgcttgcctgcccaaagggtcaacatccacatgggggtacaggctcacatcataagggtggatggtgttcatacgagcagtaacgtcgcagcttactcatctacttgaaggcactatagccttacgtttatcaacgcaggcgctacgtttgtcgatgccgtaactttctgaagaaaaaacatgaacgagttggtatcgatcgcaaagaatatggttaccaacaacagtcaccttgtctccaggctgtcgatattctacggacacgacaggaaaggattttattaattccttagaaaaaccatgttaatcaacaggataaatagttaaaacgtgataaaaggcgtaacctttgcccgcttaaagcgggcaagattgcaggcaagagatgttattatactaaaacataaaaacaggtgaggctggtgtaatgagaatcgacaaactttcactgcttaactttcgttgcttcagacagctcgatattacttttgatgagcacattacgattctggttgcaccgaatggcgcgggcaagacgacagtgctggatgcgatacgcctggcgctgtttccctttattcgtggttttgatgccagcctctacgtaaaagataaatcgctggcgatccgtacagaagatgtacgtctggttttccgccccgaagcgctgaacatggaaatgtcgtctccggccatgattacggctaccggggaatgggaaagtggaaaaacggcaacctggatgctcgacaagcgaggagaacagccgccgcatgaagataagacagcggcgcagcttacccgttggggtgaacaacttcagacgctggtgcgtgaagagcataatttgcagcaggttgagcttcccctaatgctttatctggggactgctcgcttgtggtatcaggaacgttatgaggcacagcctactgaacagcgtctggataacagcgccttttcacgtttgtctggttatgacgattgcctttctgccacatcaaattataagcaatttgaacaatggtatagctggttatggcttagctaccgtgaacatcaaatcacacaacttgaatcaccttcagcaaagttaaaagaaggtgttcgtgttcagcggatgaaagaagctattcaagccatccagcaagccattaactgtctgacgcaggaagtgactggctggcacgatctggaatacagctccagccataaccagcaattggtgatgaaccatccacagcacggtaagattcccttatcccagctcagcgacggcctgcgtaatgcggttgcgatggtagcggatatcgcgtttcgctgtgtcaaactcaacccccatttacgcgatgaagccgccttaaaaacacaggggattgtgctgatcgatgaagtcgatatgttcctgcacccagcctggcagcagcaaattatccagtctttgcgcagcgcatttccactaatccagtttattgtcactacccatagcccgcaggttatcagcacggtaaaacgtgagtctgttcgcctacttgaacaggacgagaaaggtaatggtctggcgtcaataccagcggggcgacctacggcgagccaagtaatgatgtactgcacagcgtgatgggcgtcgatccgcaacctccggttaaggaacaggatgttttcgaacgtgggattatcaatgtatttaaggggttaagccaggagtacaaaaccaataatccttgttatttcggcaagaagattatcgtcaacaatctggtgaagcatgaccgatggggctacagcctgaactggggctggcgacgcgaccagctcgccgatctggaacgaatactctacctgctggatagtaaaaccattcctgacaaccggcatgatgtctctatccggtttatggacttcgtgcgcgataatccgcgtgagcaggtctttgaagacgatatgttcaccatccgctacttttagaagggcagcggacatatcacatttaagcgtctggatctggtggagaatatgaatgatatcgtggcgaagcattatccgggggcgctgcccgcaaaataaacgctatctgcgtaataagcttcaccaggaatttctggcatactaggcagattacggcattgcgagtcagatataagcggaggcggcatggcagacaaatacttaacccaatccccggcaggcgaatttgttatgtttgccagcgatgacggtgaagttcgtgtggagtgccgctttgagcaagagacgctatggctccctcaggcaaccatcgccaacctttatcagatcactccccaggcagttacacagcacattaaagcgatctatgaagaaggcgaacttgagcaaaacgcaacctgtaagtcttacttacaagttcaacaggaaggtagccgtcaggtaagccgcaacaggcttcactacagcctgcctgtcatccttgctgtcggctaccgcgttcgttccccgcgcggcacacagttccgccagtgggcaacccagacgctccagaaatacctgatcaaaggttttgtgatggacgatgagcgcctgaaaaatccgcccgtgggttcatcggctgtacccgactattttgatgagatgctggagcgtatccgcgatattcgcgccagcgaacgtcgggtttatttgcgggtacgagagatctttgcgttagccgccgactatcaaccatcgctcaaagaaaccacgcaattttttcaaaccatccagaacaagttgcattttgcctgtaccggacataccgctgctgaactcattcatcagcgtgctgacgccagccagccgcatatggggctgaccagctataaaggtgaagaggtacgtaaggatgacgtgacggtggcaaaaaattatctcactcaggatgaagtcagcgagcttaaccgcgtagttaacatgtggctggattttgccgaggatcaggcccgtcgtcgtcagcagatctttttacgcgactggcaggataagctggatcagttcctgcaatttaacgaccgtgaggttttacaaggcgcaggtaaagtcactaagaaaatggccgatgaaaaagcgcaggcggaatatagtcagtttgctgaacaacaacggcgcttaaaagaagccgaaggtgagaaggatatcgccggtttgctacaatgggaaacagaacctaaaaagtagctcagaatgccccgaaccccacaagcaaaatcatttgggggcacaatagtgggcaccagtaaaaatccaacaagataaaaatcaataaattcaacagaccaagatatcaaattagactcctgtgattgcatgataccgtcgtgaatatggcggttttatccaggcgtaaagactgtgggtagtaatatcaagacgtgttgcgacgctggaaacagaatggccgcgctcaataacctgttttaccgctttaattataaactcttcgggataacgtttaccgctcatgggctcctctctttaagctatcttaaatgactctgcggtgtctgttaaacctgtggcgattcatttaattttttgtacgtatcccacataatcgtgctattcacatttagagatcacgtcatcgatctgctaacgaaggaatctctatgtgtaaatcccgtctcactgagcatcagaacatcgccgtaattaagttggccgaagccggatgaatggttaaagatatctgccctgaggcggatatttgtgaagtgactgactatatctatggacattgggtttcaccacatcctgtttctcactaatgtgctccgggaaagagttttcatcagatgagcgattgaaaagagaagccagaagctgaagttgcttcgaccaataagtctgtcacttgctcagactgtcacgatcagaattaagtcagaccaacttattggcaaggtataactcccggcattaagttacaaaattttctcatggcattagcattacacctccttaaagtttacatgcgtctctataaaagagtcttaaatttgtatataagaagttgatgagagcacaaatttcaccattaagtcattgaatagcaatgcaataaaagaaaaaatcttaaattaggttttaataataagaattcattacaggttgacaggaattacttttatatttcatcacatcaccccgatagtgacgaaggcagcagacagatggtattgagaaccgttatttatcaccctcatgatttagcaaatagtgctgttttaagattttttatgatattggagatactgtataaaaatctcaatgagtgaaatacgaatccgaaatgatgtattacgactgtcggatctgtcatggttccttaaagctgtattttaggtctttccaggagtttatgacactgacaatatttcgcgacttttgacagtcgtagtactttatattatctggattgacacatttatttaccaatgaaatattaatagaaacatcgacaggagtcgttcaggatgatgagaaagccttcacaaattgtccattgcattagttgcgatttatcctgtcaattatttcctgacagcgcagtacgggtgcaatactgtcataatgcggcattttccatctggccagatggtaatgctttcctgaaaaaagggtttattgaaaagttattgcttgatagacacaatcatttatccagcggttttatctttgttgatttttctttcccgaatcttcgacgatttaccgatttgcaatgggctgacagtctggcagacagtggcatgcatattgtcctgatttctgacagaagtttaactccgctggccaattactggattttgaaaagcaataaaatacaagggattatttattccgatgacgatgatattgtgcaacagcaaaagatgcaccgcttgtttaccggtcggctcgccaacagtaaacgtggacgaacgcttaactatacggaatttatattactgaagcgctttgtatcaggaataagtattcagcagattgtaaatattgacaatattgatattaagaaactttatgtgcataagctgcggcttgaaaataagctagggcatagcattcataaaataatatcaaatattttatagatccgtttccatttttattatttccatattattgcgatgtggaagacgctttacgccataatgcaggaggcagaatgccaactccccaaaattactcattcatcgccatagcggtatcagcagcattagcctctatggtatttccctcccaggcggcctgggttgacgttgatagtctgccatccagtgggctggtcagtcagttgccgccggaattacaggctattattcccgctcaggccagtaccggtttcaccaaagtcgggaccatgcccaactacgtttatcagtggaacaccggcaccatcccggtttatggcaatggcctcacgcttaatgggccgggcgcggaggcgtttgaacacactgtcacggttattcaaaacagcgggacgggaagtccgggcgtgatttttggcaacgacctgaccattcggacgcagtcggcgaatgccgcgaataatggtagagacgtcgatggcatccgtactcacggcgcgaatactccggataacccggtatttattattaccggtgaccgtacccgcatctacgtggatggtcaggatggtgacggtattaacgccggatataactcactgggccagggttggaccggatcggccaatatttacgtcggcgacgatctgtatatcaaaacgaccggtagccagggacgtggcattacagccaacgccatgcgggatgcgtcacgtgccaaaaatacgattgtcgtcggcaatcgtgcgcatattgttactaccggcgacagttcggaggggctgcgtaccggacaaagcggttcgttgattcgtctgggtgacgatgcaactatcgaaacatccggcgcatcctcaacggggatttacgcagcatcctcctccagaaccgagcttggcaacaacgctactattacggtgaacggtgccagcgcacacgcggtatatgcaactaacgctaccgttaatttgggagagaatgccactattagcgttaacagcgccagtaaggctgcatcctatagtaaagcccctgccggtttatacgccctctcccgaggcgccattaatctggcaggcggtgcggctattactatggcgggcgataacagtagcgaaagttacgccatcagcacggagactggcggcattgttgacggttcttcaggaggtcgtttcgtcatcgacggtgatattcgtgctgctggcgccaccgctgccagcggtacgctaccgcagcagaacagtacgattaagctcaatatgacggacaactcgcgatgggacggggcgtcgtacatcaccagcgctacggcgggcacaggcgttatctctgtacaaatgagcgatgcgacctggaatatgaccagcagctcaacgctcactgacctgacgctgaatagtggcgcaaccattaacttcagccatgaagatggcgaaccatggcaaacgctcaccatcaatgaagattatgtaggcaacggcggtaagctggtctttaatactgtgctcaacgatgatgattccgaaacggacaggctgcaggttctcggcaatacttcaggcaacacatttgttgcagtaaataatattggaggagccggggcgcaaaccattgaaggtattgaaattgttaacgttgctggcaattccaacggtactttcgaaaaagcaagccgtattgttgccggagcctatgactacaacgtggtgcagaaaggtaaaaactggtatctgaccagctacattgagccggacgaaccgattattcctgatccagtagaccctgttatccctgaccctgtcgttcccgatccggtggaccctgatccagtagacccggttatccctgaccctgtgattcccgatccggtggaccctgatccagtagaccctgagccagtagacccggtcatccctgatccgacaattcctgacatagggcaatctgacacaccgccgataacagaacatcagttccgtccggaagtgggcagctatcttgccaacaactatgcggcaaatacgctgttcatgacgcgtctccatgaccgtctgggtgaaacccagtacaccgacatgctgacgggtgagaagaaggtcaccagcctgtggatgcgtaacgtcggcgcccatactcgcttcaacgatggcagcgggcagctaaaaacccgcatcaacagctatgtgttacaactgggaggcgatctggcacagtggagcactgacggtcttgaccgttggcatattggtgcaatggcaggttatgccaacagccagaaccgcacgctgtcgtccgtgagtgactatcattcccgtggtcaagtcaccggttacagcgtcggcctttacggcacctggtatgctaacaatatcgatcggtctggggcttatgtggatacctggatgctgtacaactggtttgataacaaggtcatgggtcaggatcaggccgctgagaaatataaatccaaaggaattaccgcctcggttgaagccggttacagcttcaggttaggtgaaagcgcgcatcaaagctactggttgcagcccaaagcgcaggtggtatggatgggcgtgcaggctgacgacaatcgcgaagccaatggtaccctcgtcaaggatgataccgccggtaatctgctaacccgcatgggcgtaaaagcctatattaacggccacaatgctattgataacgataaatctcgagagttccagccattcgtggaagcgaactggatccataatacgcagcctgccagcgtgaagatggacgatgtcagcagcgatatgcgtggtacgaagaatattggagaactgaaagtgggtattgaaggacaagttaccccgcgcctgaacgtatggggtaacgtggcgcaacaggtgggtgacacaggttatagtgatacccaaggaatgctggggatgaaatacagtttctgattcaggtaacaacagagccgctgatcttcagcggcttttacccggaaacgctttcatttggctgataggtttcatgaacggctcccaaaaaagcttaatgcgtacagaaaaatatcgggcgtttcccgatggtgaacataaagccacgatggccctgagtcaggatggtgtaactgatacttttccctggatagacataaaaatcgggtaaaaccgtctcgataaccgcatcggacagtgtttcgtcacgcgtgactttgttgatatccgtcgatataaaatgggtgctgtctttattttcactccatacataggaaacatcacggcggatcacgccgctcattttattatcgacgtaatatgttccgctgatggaaaccaccccagtgcgttttttcagcgaatacataaaatccagcgtcaggttagcctgagtgttgttataaaacacaatcacaggcgccgtacatttctctggatcccggttcttttccgtatacaaatgaaaaagatgtccaagccctacacccagacacagtagcgtcaggcaggctaacatcagtgcctttttacccatgtgtcaccccgcggaaaaaaagcgtcacgcagcctgtatcaccgcgcgttttataaggttgctgacaaatcaatgccgtaaccgctggggtgcgactgctggaagggaaatagacccatgggtatttctgacaatccataccggtttttagaatcattgacttatagcttgcaaagcggctgccgctttcgatatcttcattccgcgagaaaaaatgacagccctgagttgtttcaaccagcgtgtagcgatcgtaaaaatccttatcgggaacggtttgccagcttatagtgccaagcaaaataccgacagcaaatgtcccggtcatccaaagtacaggtacataatgtttaaaccaacgccctgacatacgcggtggcgtctcaccctttttttctattgcctgagcgaagtctttgcggatggtcatgaggctcacacctggctcaatctgaaagcctctacgcggaaccgtgattatcagcgtatcttcattttcgccaacggtacgtaatccgcggcgaataatggagatattctgataaagcgtatttgccgacaccaccatgccgtcttcttcccacactttttgaaagaatgtttgttgtgagacgacggagggggcgttttccagcagaaggcgcaagcagcggctggcgggcgttgtcagaataatgttgagatctggcctcgataatgaagccaggcgattcatttctggattaaattcaatattatcgttaattatccataacatcgcattgttaccatgccaaaacataacgtagttggagagggttaatagacaccactgagtatagtctgatgctgtggctgcgtagcaggacatggattgtcccctgcacataccgatcatatagaagagcgagaggcataagacattaacaggtaagcgtagacaccgcttttctcattatagcagactcaggggtgaaagtacgtttggttttcttgttcgttaagtctcctgttttgtattgaggtgagaatatcacctttaatcaagtggccaaatttactgtgccactacgctttaatatcttatatataaatcatgagaaaaaatatcctgataatctaccccacatgaaagacaaggttttattcaatgtgttcctataatggcttgtaatatcccaaaaagcagcactcgttatatagggatagtttccaatttattaagagttacagtagccatacttaataaaagcacgcttcccacttaatatttaagctgtgctttatgttatttaaatataaataagttaatccttaaccaacatatttcaaatttataccaaataattttaaaactatctatcagaaacaatttgtaggggcatagtttgttttttcaatcaataatcctctctgacatgtaaaatagaaacatttattcataatatgaatattgttgtgataacaaattcgcgtgaaagtaaatcgactgaaggtgatgccgatgaatattccttcagaaagaactcaacaggttaatccagaatcggcaacggattactgtcatcagcttaaaaacggaaatcgccccggcgattaatgactttaacactgatagtgactatcagtgaaaggcaacaacaaggaatgaattatgtctacacccgcgaattttaacggtcaacgccctgccattgatgctaacgacgcagtaatgctgctgattgatcaccaaagtggcctgtttcagaccgtcggcgacatgccgatgccggaattacgcgcgcgcgccgcggcgctggctaagatcgccaccttatgcaatatgccggtcattactaccgcatccgtaccacagggaccgaatggtccgctgattccggaaatccatgcgaatgcgccccacgcgcaatatgtcgcgcgtaaaggggaaattaatgcctgggataatgccgattttgtacaagcggtaaaagcgacaggccgtaaaacgctgatcatcgctggcactattaccagtgtctgtatggcttttccagccatcagcgccgtcgcggaagggtacaaggtatttgcggtaattgatgcctccggtacgtacagtaaaatggcacaggaaattacgatggcccgcgtggtgcaggcgggcgtagtaccaatggataccgcggcggtagcctctgagctgcaacgtacctggaatcgggaagatgccgcagaatgggcggatgtatataccaaaatattcccggcttatcagctactgattgaaagttataccaaagcgcaggaagtagtaaaaaataatgaactgctggattctcaacgcgcataaataacgccctgaagaggctaaatagccccatttaatggggctattttacttgccattttggacctgggcagtgctcgccaaaacgcgttagcgttttgaacgccgcttgcggcggcccgaagggcgagcgtagcgagtcaaacctcacgtactacgtgtacgctccggtttttgcgcgctgtccgtgtccaaactggctgcgccaataacgcctggtgggataggctcttaatcaaatacgccattaataatcgccgtgaccaccgcggtactgagcgcgatcagcaccagattatccccaacgattttccactcatagcccggataataaggtaattgtcccagcatagacgccggcaccgtttttttagcgattcccggcggtagcggttttcctctcgccagatttttcgcaatccccggaggtaaagactgataacccgtcagccctaaattcactgccagttgcctggcgacagcatagctaatgtccgactcgacgtgatccggtttaccgccatttttacggtgttccgttttttgcccggcatttcctttatgtccgttaccgttattaccctgattagccgcgttattaccatgtccgccgccattaccatttcccggattcgccagcacaggcgtagcgctcagggaaaacgtaatcaacgtcgccaggacggcggttaaaccacgacgattattcatgatattgcccttctgatgtgggataccatgaaaatagcgccccgccataaaaagaacaactacatcgattcttattttaagcggggctcgccaacagcagcttatcgtatccagatagtcagtaaaatcaggatgattgctatcaggacaacctgataaaaaattttgtccaaccctcttttttgcatggcgtcacctcgttagaaaacgatttgccagagggctaaacacaacaccaacaggctaatcagtaaaaatatcagcgcgatgattttatcgggtgagcgattcatctgggcgatcctcaaacattattaaaaccactggccaaagcgtttgatataaaagcgcttcatgccttgcgccaccagacagtagctcaataatgtcgccaccaaccacgggaagtagctcagcggcagcggctccagtccaaccatcgcgcccagaggtgagaatggaatataaatgcctatcgccataatcaagccggtcgtcaataataccggcaacgtcgcccgactttggataaacggtattttctgcgtccttagcatatgcacaaccagtgtctgcgagagcagaccctcaataaaccagccggactgaaagagcgcctgcgcctctacgttattagccgcaaagacgtaccacatcagcgcaaaggttgtgatatcgaaaatagaagacgttgggccaatccatagcataaaacgaccaatatttttcgcgtcccatttccgcggcttacgcaggaactctttatccattttgtcccacggcaacgacaactgcgaaatgtcgtacatcaaattctggatcaacagatgaatcgccagcatcggcagaaacggaataaacgcgctggctaccagtaccgaaaaaacattgccgaaattagagctggcggtcatattcagatatttaatgatattgccaaaggtttcccgccctttgataacgccttcctcaagcaccatgagatctttttccagcagaataatatctgatgactctttagcaatatcggcggcgctatcgacggaaatccccacatccgcatcacgaagcgcgggcgcgtcgttgatcccatccccaagaaaaccaacggtatgaccatttttctgtagcgcttgcaaaatacgcgttttttgtaacggcgtcagccgggcgaatactgcgcgtttctccacctcagacgccagttcggcatctgacatcgcctcaacctgggttccggtcaggatatcgtgcgtatcaatacccacttccagacagatacgcgccgtcacaaccggattatcgccggtgaggactttgaccgccacgccgttatcccgcaacgcggcaatagcttttccggcgctttctttcggcggatcgagaaaagtgagcatcccttcgatggtaagttcggtctcatcctccacacttaatgtcggattgttcccggaaccatccagcttacgtgtcgctatcagcaatacacggaatccctgcgcattgtaatcttcggttttcgccagcagtagctcgcggcgtgtttccgtcagcgccaccacacgatcgccttcgcgaagatgggtggctaccatcatcatctcttcaacggcgcctttgcagatcaggcatctgtctccatgctgcgcatcctccaccaggaccgatacccggcgacgtacaaagtcgaatggcagttcatcgcgtttaatgaagcgcgcttttgtcgatggtgcgattcgaccctcgccaaaacgcagtatggcgcgatccatcacattccgggcgccgctctggctgctactattcagccaggccagcatcaatacccggctgctttttacaccgctcacatccagatgatgctccagaaaaatattgtcctgggttaaggtgccggttttatctgtacacagcacatccatcgcgccgaagttttgaatagcgttcaggcgcttgacgatcactttgcgccgcgacatcgcaatcgcgccttttgccaggttggaactgacaatcatgggcaacatttccggcgtcaaccccaccgcaactgccagcgcgaacagcgaagcctctacccagtctcccttactgaacccattgatcagcaggacaaccggcaccatgatcagcataaagcgtatcaacagccagctcacgctgttgactccgcgatcgaaagccgtctgggtacgcgtacccacaatggatttcgccagcgagccgaaccaggtacggcttcccgtcgcaaccacgaccgcttgcgctctgccgctggttacattggttcccatcagacagatattgcccaaatctagcaggcttttatctttatcaggcaattgctcgctgtctttacctgccacatcagccataacatcgtatttttctacgggtaatgattcaccactaagaattgactgactgataaagagatcgcgcgacgccagcagtcgaacgtcggcgggcaccagatcgcctgcggccagaaaaaccacatcgcccggcaccagttcttcaatgggaatctcttcctgcaccgcgcctatattgcccggcccacgacgcaacaccgtggcggtggtgcgaaccatctttttcagcgcctgtgctgctctgttagtgcgaaactcctgccagaaacgcaataacccgctcaaactgaccatcgtcagaataatcagcacgccagtgagatcggtctcttcgccacggcgtaacgggagccagtaatccgtgatgaaactaacccctgccaatgccatcagaacgtaaataaacgggttattgaatgcctgcagaagctgaatcagcgccggaggaacttgctcatgcgccacttcattgcgcccatacactttcaaccgttcgctggcctcttctatcgtgaggccctgacgatggctgttcagccgcgccagtgtctcctccgggctatgaaaagcttccgcttcgatcggaaatacttttttatgctgcttatcattttctgacgccgggcgattgagtttccggttttcaatgttcatgtcagtcatgatgaatccccaaaattaaggtgtagtgtttcctgcatatcacgcccggggaatagtaaactcacgattagaaggtgaatgccccgggagaattatctatgcataaaaaaggttattgcttactcactattttgagtgggttttattttatcgactcgggaatatccatcattccctccttatacgcctggcgtaatgttgcaattgaataaaaaactattattgactatcaatgctccagtgaattgcggtgatattatcgttatcacctattctggatataatcagctctcgcgttttacgataatcagcatgacccacgagctcggcacgaatttctttatagccctgttcctgagcggggaccgaacctaacccttgtaaacagatcgcggcctcttttacgatattcagtaaccactgacgaaccgcgctctcatcttctttattacaggttactttcaggatataacgtttttctccctcagcggatattgggagttgatttatacgctgcgccgcttcacgcaataaaatattggcgcaaagaataatgatcgtcgccgccagcgcatttttgaactgccctaagccgcataacacgccgatgcccgccgaacaccatagcgttgccgcagtgttcagcccgcgcacattcatcccttcgcgcatgatgacgcccgcccccagaaagccaatcccagagacaatctgcgccgcaattcgcccggggctgtctggcgatgtcgtcatggagctcagaataaaaacggcggcgcctgtcgccaccagcgcattagtgcgtaatcccgccatacgttgacgccattgtctttccgcgccaatcagcgcgcccaacagcatagcggccagtaaatttaaaatataaggaaacattaacatacgttcctccattttttctggaagaataagtacgtgctatatttagcacacgacaaatttctgccctgaggcaattagcgtcgtgttaacggcggaggaaataaagcgtgtttaaacatgaacatgacgattacctcgcgacaatgcgcgtgttgtaacattattgggatgacaatcgtcacaaggggagattgctgcccaccggttcggcaagcagcgcaggaatagcgtgcgttaacttgccagatgatttacgtaaaagtgactgtccaacatattactcctgcatgaatttgcgcttattatagtcagccaatatgttccgtaaagtgcaaaggcgggtttagtgacgttctgtttaagtttgtttgatattttttcttatgacaaaaaaatgacaatattatgtcgataacaagctcgtctgaaatcattaaacaataaattcctgcttaataccggcgatagctctgttatgatgcctgcacgtaaaaaaataaaacaacatgacgaggaaaaaatgggttccaccagaaaagggatgctaaacgtcctgattgccgccgtattgtgggggagttcaggcgtttgcgcgcagtacatcatggagcaaagccgtatgtcgtcacagttcctgacgatgatacgtttgttattcgccgggctgatactggtgaccttctcctttatgcacggcgataagatattttcaattcttaaaaaccgcaaagatgccctgagtctgctgattttctccgtggtgggcgcgctcaccgttcagctaaccttcctgctcacgattgaaaaatccaatgccgccaccgcgacagtgctgcaatttttatcgccgaccattattgtagcgtggtttgcattagcgcgaagaacacgaccaggcattctggtcttaaccgccattcttacatcgcttatcggcacctttttactggtgactcacggcaatccaacatcgctgtcgatctcttcagccgcgctgttctggggtatcgcctccgcatttgccgccgccttttatacgacctggccttccaggctaatcgcccaatacggcacactgccagtggtcggctggagtatgtcctttggcggccttattctgctgcccttctacgctaaagaaggaacgcactttgcggtgagcggcagcctgattctggcctttttctacctggtggtgatcggtacatcgctgacgttcagcctgtatttgaaaggcgcgcaactgattggtggccccaaagccagcattttaagctgcgcggaaccgttaagcagcgccctgctgtcgctactgctgttggggattagttttaccttgccggactggctgggcacgctgctcattctctcgtcagtgattctgatctccctcgattcccgtcgacgcgcgcgggccgcttaacgccgttgataatcacgatgaccgggcggaagagggaaaagtttaatggcgctttgccttaatctcttcgtcagaaagcccggtaatcatcagcaccatctctcgctcgatcccctgttccagcatcgtatgcgcaatacgcaaggcttcctcctgcttaccttgatgtataccttgctgtatgccttgttgcacgccttcacgcttaccttttctgcgccccgattcacgtattctgtctacgatcgtcattaatctctccttgtgttggggaacacggcgcgccacctcgcggataaacttgccaaaacgaggcgtgctgccatgctgtattagcaaataattaaacagcgcttttagctgactgtcattagcgtttcccgtaatcagaagtaccgctaagcgctcgaccaatcccatcaggtcgcgttgacgtatatgcttttgtaccagttccagcatcgcgatacgtcgatgctgcataatctcgttatccggcaccaccgtaatgtctaccagtggaaatgccgtcgcataaagctgacgcgccagcgcaggatcgtcaaactcatccagccagcaaagcgaaaagggatacgggcttttcgcgccatggtaaaacagcatgggaatcaccagcggtaacgttttatggccagcatccagatggcgctgcatcgcggcagtggcgtaacgcattaaccggaacgccatatgcgcgtccggcgtactctgatgctctataacgacatagatataaccgtcgccttcacacgtttttagcgaccaaaggacatcggaataaaacgcgcgtaaatttttctcgataaaactgtccggcgccagtttcaacgtcgtcagatcgcaacgtattcttagcgaatggggaagatgaatattgagaaaatcccgcgcggtatccggatggcgtaaaaacgttttgaataccgcatcatgaggcgtggacgtggggctttttttcatggcgatccgtcacctgaggaataagatgacgccactgtactcgccaaaaatacagacagcattcaggaaaatttacccctgcgaggaggctcgaaagggaatcactgacggctgcaatacgtacatttttgcccagcctgctacgcattatcgcccgatagcgtaacgctaaccgggcctacaaatacacgtcatctgtaggccaggtaaacgcagcgctcttcggcgataaatctcacaccagcgctttgactatctccatcaaccgaatgatgtcttcggggcgcgtattgccggtttgcggatcgataatcgagctgtaaacatgcggcatgacgcgcggcacgcctgcttccaggcaggtttgcaggataataccgaaattatccagtgagataccgccggtcggctcgataagcgtcatgccgtggcgggcagcggttgtcgccagcgcatataattccggtaacgacttttcgccgcccatcgggaaaaacttcgccgcatgtgcgcccatatcctgcatcatgcgtaccgccgcttcacaggaaacgcgggctggcgttccctggctgctgctgacgccggtagaaatcaccacctcgccaggcgttcccgtcgggctgaccagggcgttgatatgcgtttgctcgccgcccgtcgccgccagcgcgcccgccgcgaagccgctgccggtaaaggtctggttgacatgggccgggtgagtatgggcggcaatcatcgccgctttgtagtactgcgccgggtcgcctgcgcccagacccactgagatagacggcacctccgccatccagcgtttcacctccggcacgccctcttctaccgtagcgaactgcgcggaaagtacgccaatgaccgcatggccttcggcggcttcatagatagccttcgcgttggcgatatcctttgccagcacgttaatcgctacccgctgacgataaaaattaatctgctgcatgttctgcaatctccctgagtcgcgccacaatcaatgccatttccccttcggctaccgtgcgtggatcgaggctaaaaaccccctgatgaagctgatatttgcgggcgtaaatcgctatctcgccgccgcgcagctgcgcttcgacgtcctgcgcgttcagccccaattcagatgcgttcacccgcacacgaatacgccagattgcacgcccggcctcatcctgttcgatatcggcataaagtccatggatggcggaaatcgcttccgcgaccggctgtaactgtgctgcggtcacggtcgtctggccctggtggtaattctccagcgcatacaccagcccaaccatgttttccttgccgattttcattgctctggcaatcccctggtgctgcgctttgcaggcggcaatccacgttttcctaccagtgataaagccggaggttggcgcattaaaggctttcgcgccgctatagataaccatatccgcgccgctcgccacccagccgcgcaaatcctcttccgccgcggcatcgacaatcaacggcaggtggttggcctgcgccacctgtacaaaatcgtcaatgctcaacatgcctttctgtacgcaatggtgtgatttcacatacagtagcgcggcggtcttttcgttaatggcgctttccagttgccagcgggtcgccagattgctcgaccccacttccactatgcgcccgccgccaagacgaatggcgctggtgactggcgcgccgtagtccacattatgcccgcgcagcatcactacctcattggccataccgctactgtccggcatcagggcgacgcgcgcccgatcgccgtgggtgatagcggcagcgacggcaatggcaatacccgccgaggcgcacgaggtgatatagctatcttcagcacccgtatagcgcgataccagttcgccggttttttccaccagcgcgtcaatctcgacgaaagcggaagccgcgcgcgcggtggcctgcatgacctccggcgcgacgcttgagacgcccagaatggtcattttgccgcaggcgttaatgacctttttcaaccccagttgttgatagatattcggcgtcatgatttacagcactcccaacaacgaacagactatgctcagtgcgacaatcgacagcaaaatggtggtgtagcgcggccctttttttaccagatagaagtagatggcgaataccgccgccagtggcagtaagcccggcgcgatagagtcgaggatctgctgaaccaccacttcagatcctttcaaggcgctaatttttaacggcgtggtgattttgacgtagctggcggaaagcgcgcccatcatgatcaaacccagcacgttggccccgtagatcagttctttgattcgccccccttgcagcaggccgataatcgaatcacgccccagcgtatatcccttgtggaccataccgtagctgatcgccagggtgatcgccgggtagagaatcagcgggataataccgcccatcgcgctgccatttgccgcgaacggaataaagatcgctatcaacagcggcatcaccgccgcccagataatcgagtcgcccatcccggcaagcggccccatcaggcccgttttaatgccggtgatagacgagtcgttaatcggctcgccgcgcgttttttgttcttccatggcaatagagatgccctgaatcaccgcgccgaaggtctgctcggagttaaagaagttaaggtggcgttttagcgcttctacctgctcctctttttgtgggtaaagttttttgatgatcggcgtcatcgaggcgcagaaaatcaggctttgtaagcgctcataggagctggaaacctcggcgcccagccagtagataaaccaggctttggtgatatctgctttggtcagcgccccgctttcccgcgcgcgctcaaccagttcatgttgcattacgtcactgctcatcatgctgctccttcatttttcgccaggcctttaatcaggaaggcgacacaggtgccgaagatggccatcgccatgatgtcgaccttgaggtacaacaccgcgaagaacccgccgataaaccacggcaacaggctctttttaccgatcaccataatggtgatggcaaagcccagcgccggcagaatgccgcccatgatttcaaaggagtgggttaaccagtgcggcatcagtttaaggaaactttccaccacatcctggccaaagtagttagcggcaaaaaccaccgggaagcgcagcaccagccccagcaatgccgggtaaagaaaggcgcaacgcatgatgcccgccatgtttgccgtttccgcgtgtttatccgccatatgcacccaggcagcattcagcgtgcgcctaagctgatcgagaaacacgccaatcacgccaaacgggattgccagcgcgatcgccaggtttgggtccataccggccttcaccgcgataggaatggagatacaggccgccagcgccgggtccgacggcacgttgccgcccggcgttgaggtcacgcccaaataaacgagctgcatccctgcgccgatgatcatcgcagtctgcatattgccaagcaaaagcccgacaaataccgcgatcaccaccggttgtaacagcatcgcggagaaggtgtagccgaggcgtaaacgggcaaaccagtaatacaaccccatcaggcttgcaaagagtaaggtatccatagtgttatcctatacacttcatccttcaggctgcctctttgttggctgccttcgctcaccccagtcacttactttagtaagctccaggggattcactcagttgccgccttgatgcatccagaatgattttgtgtctattaaagggttagaattttttcaggatatcgtcgagcggctgcggcttatcttccggaatggtctggaaaaatacctgaacgccacggtttttcaggtcgttaagaatgccgacgtctttttcatccagcgtaatattctgaaaaaccgccttgcggtttggcccgccgccgagaccgccaacctgaatgtgggtgacgtcaaagcccagttgtatggcgtcctgcaccgccgccagtgacggaaaaagcaccagcacgttaccgtcgccaagctgattttctttccatgcagcggcaaaactctggttgccgaagcaatccactttgatatttggcggcgccgccatcaggtagatatttttcataaacggatcggcgtccagttcatcactcacaacggctatccggttcgcctgagattgtccgacccacttcgtgacaacctgtccatgaatgagacggctgtcgatgcggcataaaacgatattggccatgatgttttccttagagtgattgttgtagctgacgtacatgggcgaccacatccaggcagctactgcgcccggcctcaactaactcgtccacgcaggcggttagcatcccttgttcgcgcctgtccagcgcctccagcagtagcgacgcattcagtccggcaatcaccgccaccggataatcggcgcttagccgcgccgcgacgttggacgttgtgccgccgacaaaatccgtcaggatcagcgagccttccggcagcgttttcaccacggcctcgacgcgttgataaaactcgcccagcgtatcgacaggcattagcgcgatttccgtcacgcctttaatttcgcccgtgaccatacgcaggctgttgcaaagcggttgtccccagccgccatgcgtcagcagcaggatgtggggcaacggttgtgtggtagtcaaaatggcctcctggcgcaattacatgaggacaccggcatatattgcccggtggcactgcgcttaccgggcctacaggacactcccggtaggccggataaggcgtttacgccgctatccggcataacgcatcatcagaagagcaaaggttgtgccagaatttgtgtcacgcgaggaagaagaaaggtctggcgaggcgcgaagccccgccagtaaaaggattaactatagagcagttcgtagatataaaaatattccgcatccgataaacggatggcgtaggcgtcttcgatcggcagaaaagcggatttgatgacactaaacgcgcgcgcgtccagattcggctgactttccaacgccatctgtaacggttttcggttaatcacaatacgctctaccatacagcagcagtggatcaggaagcgcagtgtcacctggcggcttggtttcagggaaagcgaagacgtcagatggttaaaaacgccctccatctctttcagaatacgctgcgggttaagcacggaaatatggttgatgatactctccatcgttagcgcgctgataaagcgcatggcgctgcgctccatctccagacggcgttcagcgttggacagatcgggcgttaacaggctcaacaccagttccggcccttgttcggagaaaagctcttccagcgaaataaacggaatatccggcagccccggctggaaagtgccgacaatccccgccagccgctcgctggcattcaatgcctgctgaacgcgctccagacttcgtacctcgttataatcaaggatcaccatcctggtgtcctgcgacatcagttcgccaaagctctcctccagcacctttttgattttttccgccgttcccatgccagtaatacaggagatgaccagcactttgccgccgttctcctgctgcggcgtacaaagctggcaggggatatttttactctgcaggagcgccgtcaactgtggtaagtcgctggtttcatagcttaaatccagcccgacttccagcagactggtcagcgtgatgttcggcatgagcaaaacatctatctggaataacttactgatcgtactgccgaaatggatcaatgagccgatgtccaccaacaggataagccgccgatattggcgggtttgaatcatttgggtcagcgtttccagcgtgtcatgcaccgactgttcaaacggcatgtcgatggcgctgaacagctcgcgctccagcacgcggttgacatattgcgcctgactggtggcggtggtcgcgccgtgggcgattaaaataaccccgcagtcggggctggcatcgatacgctgacgataatggcggcactctttcaggaacaggcatagccagaccacttccgtcgccggacactgaatatgcagcagttcgttgattttccgacacagcagcgtggcgttgtcatattcgtctttgcagcgatccaggatcaaactggaagagtaaagctgcgggatcaggccgcgctgcacgtagcctatcagcgccaggaagtgtttacgcagtgggttaaccagattttccggcagcgaaaagcccaacacctgctctacgcagccaatcagcagcgtcacgcgctcttcaatctggtcgccatagcgcggcggatgcgccacgctgtcacggctgtagagaccgtattcaaaaatcgagctgagtttatttttcaggatcgccagcgtctccgccggggggacgttactgttgcgcaaattaacatactcgcgcgtcaggaagctgtaaaagaggtcgctctcttcaatttccgccccggtcgccagcgacgtcttcaatgcgggcagcgtgcgcgcgtctatatttagccgcgctttaccctcaaacagagtatccaccaatagacgctgttccggcgtcgggttaaccgacatttccgccagccgcttatccagctgtagcgtgtcgttatgctcggtcattcccgatgcccacgcctgagcgcagagaaactgaatatcgcttttaagctgaccgatattgccttccaggggtttattcagcaaccagagtaacaacggtttatcaatgctgaccgtgcgttctattttgcggctttcccgctgtaagaaccccacgatcagttcgatctgttcttcaacggagcgctggtgaatgcccggcaaatcaatgcatacctgaatacgccgctggaaagtacgtaacagcgccgacccgaccggctcggtagtggcgcaaatcaggcgtaccgaaattgatcgcggctggctgctcacgccgagcggacggtactcgcctttatccagaatagagaacagcttttcctgcccttcataagacagacggtgcacctcgtccaacagcagataaccaccgtccgcctgctccacgaggcctgttttatgttcattcgcgccggtaaacgccccctgccgatgaccaaacagatgcgaggagagcagttccgggttatgggcgtattccgcgcagttaaagtagaccagcggcgggatagcgccgctcgcctgttcacaggcgaaacggtgcatcagttccgcaaaaaaggttttaccgacgccggacggcccggtaagcagaacgtgtaaaccgtgcggatagagcaccgccgcacggcctttttctaccgcatcgcgcaggctgcgatcgtaaccaatcaggctggtaaacggatcgtcgggcgcgtaatgctcttcatgcggcagcacatccgccaccgaccgcacctcgcgttcagactcttccagctgtcgtcccagcaacgtttccagcgcctggcgatgcagaaaatagaccgggcggccacggcttttgattgccaggccgtcattccataactgattgagatctttgctgacggagttacgcgccagcccaagattgaaacctatcgcctccgccgtaaacgccgtctcctgcgccaaatcggcaagacatagcccgcgcgtcagccgttccagctctcccagtacgatctcaatacgtctcattacactaccgcttacgaaataaaagagtagtcagaacatacactattctgccacgcaagaaagtgaaggcgcagcgagaaaccgccttcccacttttgcctgacttcaacgccaacggatagcacgccccgatgagtgaacgtcgcacggtctacacttactcttgaaaaagtgcaaaccgataaggataccgtttatgaaacgaaaaacgcttctgcttattgccacacttgtcgcgctaccgggcgtcacgtatgccgactctccgtttagctcactccagtcggcgcatgaaaaaaatacgattttaaaggatttgcgcaaaatgtgtacgcccaaaggcgcgctaaccgatgaagcctgggagaaaaaaatcatggcgagcgaggggaaccagcagcatattcgggaggcgatgatcgcgatagagcgcaacaatcagcataactactggcaggctctcggcaaggtggaatgcccggagatgtagcacagcttttccgctttttggtcgcgaaaatgcggactgtaaccggtttctgttcgctaaaagcgcgtattctggagcgaatttacgcgatcaaggagtacgacaatgcgataccgttttcccgataacttctggtggggcagcgcctgctcagcgttgcaaaccgaaggggatagtctgaatggcggtaaaagccagaccacgtgggatgtgtggttcgagcgccagccgggtcgttttcaccagggcgtcggtccagcggaaacctcaacgttctatcgccactggaagcaagacatcgcgctactgaaacagttaaaacataacagttttcgcacctcgctaagctgggcgcggctcattccagacggcgtaggcgaggtgaatccacaagcggtgagcttctacaatcacgtcatcgacgagctactggcgcagggcatcacgccgtttattacgctgttccattttgatatgccgatggtcatgcaggagaaaggcggctgggaaaatcgcgacgtcgtagaggcgtttggtcggtacgcgcaaacgtgttttaccttgtttggcgaccgcgtgaagcactggtttacctttaacgagccgattgtgccggtggaaggcggctatttgtacgacttccactatcccaatgtggtggattttaaacgggcggccaccgtggcgtaccataccgtgctggcgcactcgaccgccgtgcgcgcctggcgcgccgggcgctacgacggtgaaatcggcatagtactgaatctgacgccgtcctacccacgctcgcagcatcccgccgatgtgcaagccgcgcaccatgcggatctgttattcaaccgcagttttcttgacccggtattaaagggagaatacccggcggacttggtggcgctgctgaaaacctatgaccagttgcctgcctgtcagccaggcgaccgtcagcttattgccgacggcaaaatcgatttactggggattaactattatcagccgcgccgcgtgaaatgccgtgatacggcggtgaatccgcaagcgccgtttatgccggagtggttatttgactattacgacatgccggggcgcaagatgaacccttaccgcggctgggaaatttacgcgccaggaatttacgacatcatcaccaacctgcgggataattacggcaatccgcgctgttttatctccgaaaacgggatgggcgttgagaacgagcagcgttttgtgcaagcgggacagattcacgatgattaccggattgactttatttctgagcatcttaaatggctgcataaaggcattagcgagggctgtcactgtcttggctaccacatgtggacctttatcgataactggtcatggctgaacggctataaaaatcgctatggttttgtacaactggatttagccacccaaacgcgcacggtgaaaaaaagcggagaatggtttgccgccaccgcagagcataacggttttgattaagcatttattattgccggatgacgactaacgtcgtatccggcctacaaatggcagcaatatcaactcattggcgtaatacggactttcgccgccacgactaacgccgtcaacagcatcaggccgccggaaagcgccagcggcgaaagcagcccgaaattgtcgagcgcataaccgcccaccgccgcgccacaggtatttgccagttgaatcaccgcgacctggatggaaccggctttttccgcctgatcggcaagagaacgagtgatccacgttgaccatcccaccggcaccagcgcaaacgccagcccccagataatcgctattgccgccgccacggttttgtcgcttccccacacaatgagcgtcagcgcgctcagcgccagtagcagcggcgcaccggccagcgccagttttaccgaacgtttcaggacataggatgagaaagaagtgccaacgaagctggcaataccaaaacttagcaacaccagcgtcagaccatcaacgtcaaagcccgccagattcatatagaccgggcgaatataggtaaagaaagcgaactgcccggcaaaagacataaagatggcgatcatcccggccatcacgccagggcgttgcaacaggctaaacatattctgtttctggtgagaaggttcgcccggcagcgacggcagtgatttcaccacccagatgacgcacagtacgcccatcaccgcagcggcgttaaagacattacgccagccaataataccgcccaaaaagctgcccagcggcgcggcgatcactaacgcgatggagacagcgccaaaaatcaccgacagcgctttcggcacggtacgcgcgggaaccagtcgcatggtcagcgacgccgacatcgcccagaatccgcccagcgccaacccaagacaggcgcggcccagcaatagcagcgtaaagctgttggcaaaggagaccatcagacaagaagccgtcagcaaaacggcgaacagaataacgatataacgcctgtcggtcgcctgaataatctgggtaatgaacaggctggaaaacatcgcgacaaacgccgtaacggtgaccgactgaccggcgacgccctcggagatccccagatcctgcgccatcggcgtcaacagactaacgggcaaaaactcaacggtaatcaggcaggcgacacaaaacgccacggcaaaaacggctgaccagttaggcctggcaaccccatcagcgcggaatttttctgcgatattttcattcattgtggttacctgcgtcgttttagtgcggaaaatccacgcagtgtaacattacaaaatgtgatctgattaacgttttagcaactgacattgttgcgctgcattttgcgaggctggtcgagagttgagaattatcttctctcgctgcgtgtaaaaccaaaaggtaagacatagtgtatcacctggtgctatactttagattacaggatgtcaacctgatgcgaaccttcaaaaccaggtggtttaacagagaagcgaagccccacacgataaaagatgacgagttaagcgaggccatcaacgccgtactgcaaggaaaagcagataatcttggcggcggggtttataaaaaacgtctcaatcaaaatcgcgatcgcgcaatcgtgttggcaaagggaggcgaacattggttttacaccttcctgtatgccaaacaggatatggccaacattagctatcgcgaactcgcgggtttccgtgagttagcaaaacactatgcttgcctgaccgaagatcagataacggcactcattaataacaaagaactggtagaggtgcgccatgtcagcaaaaactaaattcaaaagccctgcctttgaaccgattcatagcgcggcatctggattatttagcgtggatgccattccccaggagacaatgcgcagttttgacacggcctgcttaagcagcatcaaagacctgcagccacttgaaataaaagcgttacgagaaaaactcaacgttagccagccggttttcgctcggtacctgaataccagcgtatcaacggttcaaaagtgggaaagcggcgccaagcgtcccagcgggatgtcactgaaactacttaatgttgtccaaaaacacgggctaaaggtgctggtatgagggttttaccgatggtctgttaaggctattcatacgatcatgagtgcaggaagcctctacaacttcctgcgctgtttgacgggaattgcactatactgactcaccaaagccatcagcaaatgcagattttaattcatccataaaagccagttcatcctgtccatcacaaattaaatcaatcattgtgtttccctttacgccagcccccaaaatactcatcattcctttaatgggaatttctttgtcattattaactagcgttaatgaagactggtattttttgacaattttcgcaagcgtagcggctggccgcgcatgaagccccgtactgttcataacgcgtactttttgtctaatcatatattttccttaagagactttgcggaatgctgagtgatttttattcatcatcttaattttagaataaacatcatcctcaactgcctgttttgcgttcgccatgacacgcgccagattagcctcgttgttattatttacccaagccttaccaacagtagtaataaaggctttgcgcaaatcactcgcaatattcactttggctactttgtaattaacaaagctgcgaagaatatccgcgtcaataccagaacctccatgaataaccaaaggtaccggactgacagacgcgatgcgttgtaatagcgggatatcaatgcgtgggatatcttcaagaccatgtacattaccaattgacactgccagcatgtcgcaccctgtctcctcaacaaagcgctgaaccttctcaggttcagttttgcagtcagcctcgctgacatgatcatcttccttacccagaatagcgcctaattccgcttcgacgggaacaccaaatgatttacagaaatcgacagcttctcgggtaaatgcaatattttcttcgagcggtagcgccgcgccatcaatcattactgaggtaaatccggcccggacagcctgcttaacatcttccagagttttcccatgatccagatgcaggctgacaggaatatccattttatcggcatgtcgcttaactatttcataaatgtaatcgtaacctgaaagctgtgcattagtaggagcaatttgaataaaattgggcaatccggaacgttctattgcattaagaatggaaattgttgtctccaggttcgttgtattaaatgcccccgcaaggacatgtttttcctgaatacaattgagcaggatcctaccattgactaaaggcatattaactccagatatttatgtgagcagtgtaagtaaattatcgaactattgagttatcacagttattcaccaataagcgccccttcttgccgcagtttaaattggtaaaatgacagccattgctgctgatatattttcaactttgcagaacgaaccgcgtcaggaaaatatcgctcagccacaggaacagtcggggggacaacattcggacaggctatcaacaatgctccaagggagacggtttcatcaaaagcaatggcctcaattggacactggaggatgtcagccttcaactggagccagtatgggtttttcaccgcagggccaatgacttttactgtcctgcccgccgggatattaaagcacccgtgacagtgtgcaaactccatcgccaggccaataaagacactctcaagcagagactccggaggaagtgaatccgtcagaccaaaaagcaggccacgagtgtgccgatttttatttggcgaacccgagccccgcaaatgaggaataaataccggcacatgctcgacagaccaggaaggtttgaggtactgctccatgactttttccaggcctgtgcttatttccttatcagttaaacgaaaggtttttttcacccattcaagcgcataaccgccgacaggcagagaagcgaaaagcgtgaaaaattcaccatcggagtaacaaccatttgccagcttattcctgcgagcctgcacatcaagcgttggctgtgtattcagcagtaaaataccctctgtcgtgccggtagaattcagcacatcgcccggttgcatctgtaatgcgcgggcaccgaccatatgatcgtgtccagcgagggtgacttttacctcatgagagaagcccaattcctctctaagcgttgccgtcatccatccggccacttcacctggctttatcaacggagccagtacaccgaacggtatgccgagaatcccggcagcattacgagaccaggtacggcgagcaatgtccagacacaacgttctactggccagggatatttccgtctttttcgcacctgtcattctccacaacaacacttctggtgcatgtaaccagcagatatcttttctttcatgcaaggaatagttatcaagcaaccatctcattttaaatgctgagtaattactgtgaggtggcaatcccgttatagaatacagttcttcagcctctgccttgcttaatgacgagagataagattcaccacgtcgatcataccaggccagcatcggggtaagaatgacgccctccttatccacaaagacgccagactcaccgaaactcgcaatactgatattttttaccggaaacggtactgaagccaccagttcagccattaccagtcgcagtgcctgccacagcgcttcgatatcgaaatctacctcgcctttgtccgacgatattgttggcgtcggaaacttgcggacttccagaactgacacgtcatgacaggaataacagctgactttgcagttagttgtgccaatgtcaatgacaagcgctgcgtggtaatcaggcatagaccgttccttttgtcaggcgaaaaacaccataaataatcagcgcaagcacaggaatcagcccgatagcaataatatttccgttgaatatttcaagcagccagaaacggaaggggttaccgccatcaaggaagcttgatacctgaccacttgacccctcagccattttgaaattgacatctttagccataccggtaataaatggcgcaattttggtcgcaatccacaagtcggcgacaataacaggaattgcggttatcacagcccggaaaatattgccacgacatgccagtacaatcatggaagccatgactgccaggttcgcaaggtctccgagtggcaggactttattgccaggaagaaggaatgcaataaagacagagataggtgtcagaatcagtgctgtagatataatggctgggttacctactgctaccgcgatatccagtccgataaagagatcatcacggccaggatatttggcattcaaatatttcttaatggcttcagacagaggtaataaaccttccatcaaaattcgtaccatacgcggaagaatgaacatgacaccgccaatgctgatccccagcaacaggatatgtttaaagtcatatccggcaatgatgcccaacaagacccccagaatagtacccaccatcataggctcgccgaagattcccatttttttctgaacgttttccggatcaatatgaatacggttaacgcctgggatcttgtcgataattttatcgaacagcaatccaatcggaaagaagacgacagatgacagggtcggaagtgaaataccttccagaccgaagtactttgccactaatggcgctgaccagtccgccagtttgagaaccacgatcgcggcaatagcggctgcggacaaacccaaaacaaaactccctgtgctgtagtaaaccagcgttccagccagggcaaagtgccagtagttccacatgtcgacatcaacagtacgtgtcttattcagggccagcatggcgacattaatcagcatcgtcagcggaatgacaaagggtgcgattggtgagccccaggtaattgcggccaatggtggccagcctaaatcgacaacaggaaggctaataccagttcgctcaaccattgcctgtgcagccgggcctacgttgctggtaagtatgtcaaagatggcataaattccgacaaaccctattccgacaattaacgatgagcgaagtgctttagcgggttttactttgaagaacaatgccaggaaaaaaaggaccagcggcaataaaaccgttgggccaaaccccaggacatattgcacaacggtatagagagtatgtgctatatcattcatatccgacctcttattcagatgtgaccagacctcgcgttagcgcctggataatttatctgttttttatttatgaaatcaggcttggcctttaaggattgaaactattttttcaagaactttatcttcacctactccggtaatgattggcaggccactaacaaccggaatatccagttcataaggaactttcgttgttgatacaaccaaagctgcaccatcggtattgtttggcaatgaggctacattagtttgtgaataattaacatcaagcccattatctttacaatattccattactttttctgccacagccgtggaagtagcaacacccgttgcgcaaacaaatagtatcattttactcatacttcacctctttcagatatgcgtgtgtaaattgactgataaatttcatcatcattcatgaccagtaactgctgcataaaatcctcatcctggatcacatccataatccaacccagtacgttgagctgcttattgctttcacctaaagcaagcataaacaccaccctgacaggtacgggatctggttccccgcccatatcttcgaaattgacgggttctgccagtattccaacactaatggcgttttggcgaacatacttgtgatcagtatgtggaatagcgacgcctacaggctcaaccggtagacccgttggaaaattctgttctcgcgtaatgacgtgatcggcaaaatcagatacaaccataccatcgttaattaacggactggcaagagccttgattatgtcattctgactcacctctttagggaggtgtcgaacataatgacggcgaaaatgaatatcctgcatagattcctctttgctagtcaggcatccaggcgctgtaaaatagtgccaagataatatttattaccttttaaccagacgttaccaaaatcaatggccaatcctctagagaaaaataccaactgttccaaatgcaaaacaggtgcgtcttcaccaatatcaagataatggcctcgctcattaccaattaatttggctgcgtaacggctttcagaaaaacttattttcttatcagataatctttctattgctgaaaataaattctccctggtaaaatctacatcaataataccggggcagagatcaatgttgatacgattttcaatcaacatgactttttcatcgccaatacaacgaaggcgtttaagaaataaaacatcttgtcccggtttgatactcagtttctctgctacaaagcggttagcgggttccagtcgggaggttatgacactggttgtgaagtttatcttctggctggctaaggcttcagcaaaggagagcaaaccttcacccagtgggtaagcaacattttccttctttacgaaagttcctttaccctgcacttgcacaagaacaccttcccggacaagttggtcaaccgcttttttaacggtaccgcgactcacctccagcatatccatgatttgaaactctgaaggtatccggtcatcctcaactaattctccgctataaatactttcccttatccactccacaacctgttgatacagtgggatgtgtgaacttttactcaatgttttcatggtgcgcgcctaaacatttagagttgtctatagacaatcatgtacaacttcgagtttatgataagaaattttgagacaggaggtatggcaaggagtcacagttttagtgttcaaaacaagatcacatttccgtgatatatgtcacggaaatgatgagctataagtctctgacgttttggcgtcgttagcggttattcggtgcgttacttctgtggttcacccttagcaaatacgatggcggctacgctttatttagttaacgatgaatcgcgccacccggccgttaatcgtggctcgccgcccttgccagcctcattcatctcgtcttttgttaacgagatagtgaagagtatcaatgcagccagtggacaccctcttccggctgaaaaaaggcgttatagcgcagttgaaacgcgttgatctcctgcatatcgggttccatttcgcgcaaaaagcccagcgccagccgtacctgtgtatcggtgatcggcgcggctaaacgcgctttttgcagcaaccgatgccaccgctgcaaattctgatcgccgccatcgacaatcaccatttgccagatcagtaacacctgagcggcattttgcaaatgcgactcatcagggcgatgcagatactgtaaaaattcaccgcccgccgttttacccatctgatcaatcatcgattctatcggcactacatcaatattcagacgttcgctcaggcggcgaatcgcccggcgggtatccgatgtcagcacccgaaaccccacaataaacaccaccacaaacgtggccagaatcaaccaaatcatgcgcacatccgtcaccaaacaggatgcccatcataacggtaaatttataactgtcgacgttctggcctgtcaggatgtgatttattaacgcttgtcttcatttacgccagacgccggatgtcctgtctgacgaacgcaaggcataaaaaagcccggcgttaagccgggcaaaacgttaccaaatgcacacatttaagcgatattgacttgctgaatttttttctcacggcggattttgcgctcttccatcacggcgaccatcgccatcaggcagatacagccgatcgcggcggcgtccagcgcggcgaacgtgcccgcccagccggtcagaccaaaaacgggggtgccgtcggcaatcatgcccagacccagcttggcaaagctatcgccgataagataagcgaaggtgcccttgataccgtccgcagcgccgatggcttttttcggtacgaaaccgacagccgccacgccaattaatagctgcggcccaaacaccaggaaaccgagcgcgaacagcgaggccagatagacatactggttgctggcgtgctggtagacgccgagggtggcgatgattaacgccagcgccacacaggctaccagcgcacgacgaccgttcgccaggtcagagagccagccccacagcaacgtgccgaccagcgcgcccacttcaaacaaggtaaagccctgaatcgccacctctttagaaagtttcagctcctggaaggcgtagacggttgaccactggtcgataccaatacgtaccacatacaggaagatattggagaaacacagcagccagatcactttgtttttcaacacatattcaacaaagatctgccacttggtcatttcgttttcttcagtctctttatcctcttcgctgatctcttcgccgaacagttcttcagctttacccagaccgtaagattccggggagtcgctgccgaaacgcagaccgataaagccaacaatcagcgcgataatcgacgggaagataaacatgccgatgacgtgaccgtcgaacaggtagttggcgccgaacagcgccacacctgccgcgcccgcgccgccgaggttgtgggagatattccagaagccgagaaaggtgccgcgtttacgacgcggagtccatttggtgatggtcgagtagctgcacgatccgccggtactctggaagaaaccgctcagggcatagaaagcgatcatcagaaacagactggttgaccccgcgcccatgctggcgctgaagccgagcatacagatagcggagaggatcaacataaacggtagaaactgcttggtatttttaccgtcagcgtagtaggaaaccagcgttttccccacgccataggtgatcgagaagcccaggccaatcatccccagctcggtcatgctcaacccgtaggtagagatcatgtcgttctgcgcgatgttaaagtttttgcggatcaggtacatggtcaggtagccgataaaaaccaccagataggactgcatgaacggcttgaaccacattttacgccgcacatcgagcggcagatccagggtcggcttgcgcacctggtttaagaaggccagcatggattactcctgagctaatttttatacctgcgaatggcaggcattgtaaaaatccacaggaaaagtggcctgcgacagcgtccaggcaaaaccgggaaaatttcttagttttgccccattcagcgcaaaaaggtgaggtgtatcacgcttcgtgggtctcgcgtggggcctgagcgttcagaaatggcaacagcaatagcgcggagatccccgccgcgatggcgatgaccgcaaaaaaaccggtccagtgccagatctccagcactttcgctaacggccagccggaaagcgacgcgccgagataggcgaacaggccgacaaagccggtggccgcgcccgccgcctctttatgcgagcactccgccgccgccatgccaatgagcatctgcgggccgaagacaaagaaaccggtggtgaagaaacaggccgcctgcatcacgtagctggcgaacggcatcagccacagcgaacccacagagagcaaaatcccggcggcgaagattaaattcatcggtccgcggttgccgttgaagagtttgtccgagccccagcccgccaccagcgcaccgataaatccacccagctcaaacatcgatactgccgtgttggccgtgaccaaatctacgcccagcgtctcggacatatacaggttgccccagtcgttgatcgccgcgcgcaccacgtacactaagacataacacaacgaaagcagccagatatagggattcaacagcacatatttagcgaggatttctttgcgacttagccccgcgccctcttgctgttgggcgacctccagcgcatcgtgccgccagtcgcctaccggcggtaaaccaatcgcctgcggacggtcgcgcagccgccagcagaggaccatgcccaccccgatggcaagcaacccggccaccatcattccgacgcgccagccataatgcagggcgacagcggccataacgagagggatcagcgccccgccgacattgtgcgcggtattccataacgcccaccagccgccgcgctcggtacgcgagtaccaggcagtcagcaaacgggcgcaaaccggcgatccaaacccctggaaaaaggcgttcagcgcccatagcagagcaaaggcccacagcgaggtcgagaagccgaacagaatattcactacgccagtcgcaatcagcccgatgcccataaaatagcgagcgttagagcgatcgctaacgatgccggagacaaatttcgacaccccgtaggtgatgtaaaacagcgtcgccagcaggccgatatcgctgcgggtcagaatgccgctggcaaggatttccggcgcggcggcgttaaagcttttacgggtgaaatagaacagcgcgtaacccaaccaaatggtgatcaggatatgccgccgccagtagcgatagcgggcgtcaacctcgtgcttatcggtgatgagcggcgcgttggccggggcttttaaaaacgaaagcattatccttccttaaacgtaacgctggggcaacgagacgctcacccgcgtaccgtgggtacaagagatggttagcgtcccgccgagcgccgacacgcgttcgcgcattccggtcaggccgaagccctgctggtgagagcccggcggcaggccgctgccgtcatcctcaatcaccagcatcagccgctcatcctgctgccagccctggagcgtcaccgcgctggcattggcatgttttacgatgttattcagcccttcctgacagacgcgaaacagcgtcacgcgctgactttcactcagcgccgtttcgtcaattcgccagtcgaggtgactgacaataccgcggctttccagctccatttcgcgcagcagcgaacggatggcctgcgccagcgttaagtcgtctaactggcgcgggcgcaagcgccccagcaggcgacgcaccgcgtcatacacgcccagcgaaagctgctcgataagttgcccgctctgcttcacgccgccgttatccgccgccagtcgttgcacaatgcccgcctgggtacgaatcgcggtgatggtctgcccgatgtcatcgtgcagctcacgcgcaacatcgcgccgcacgctctcttcggtctccagaagacgctccgccagccgatggttgcgcgccagctccttttgcaacgactggttcagctcgcgcagacgctgaatgcccgcgccaagcagtagcccggtcaggctttgcgccaacagcgaaagtaataaatcgacgggatgatcgtgccaggtctggctggcgatcagcgcgatagcgttcatcagtgtggcaatgagcgcgccctgccagccataatgccaggcgagcgcgataatcggcaacgccaggcagaacggcgtaaagcgcgaaagttcagcaggtaaacccagttgcagccacagactgacgataaacagcagcagataccagatcagatgccgcccgcgccagtttaccggctgcgataccagcgatggtcccagcggcagccaggtagtgctggtgagatagtgccagaaaaccaggcagatgggggccagcgtcagaccacccgtgagggtcagcagtagcgcgttccatgcctcttccccctgccccagccagggcagggattgcagtagcgccgcggcggtgagggccgcgccctgaagcaataacgtgcgccagtcgcgctgatggcggtaacgcgaagtcagcgccacgggcagtagcgtcaacacactaccgatcatcaaaagcggcagatgggccaacgcaacttcctgcgccaaccagtacaccagcagccactccgcgcccagcaatactggccagtatccgcgcgggcattgcagcataagtcccaggcgcaggccgaagggaaagagtagcgccgccagctccgggcgctctaccagatgcaggctgatactccacaggcagaaccacgcggcggagaagataaaaaagcaggcaacaacggtgattaaacgggaaaaaaaggtgttcattaccaaccgtcaaacatgcgatgcgccagttcaacgtcattgctgacgcctaatttttccagcagattcgcgcgatggacatgcaccgtttttggcgacagccccagctcggcggcaatctcttttaccgccataccctgggcgagtttttccgccacctgacgctcgcgtttggtcagcggatcttgccgacccgccgccagtttcacggcaatatcgggggtcaaatagcagccgcccgtcgccaccgtatgcaccgcggcgatcagttcatccggactacagcgtttagagagaaaaccgcgcgcgccggcgttcaacgcctgttccaccagcgccgggctatcgtgaaccgagagcacgatcgtcgccatcccttttggcagttggcttagcagctccagtccggaaatatccggcattgagatatcgcagatacatacctgtacgccgcgccccggtaagcctgccaacgcttcgcgcccggaaccaaattcggcgaccacctgcaaatcaggttccagccccagtagctgtgcaaagccggagcggacgataaggtggtcgtcgataagggcaacggtgatcatgggttctgtcctgatggataaaaaaaacgcgcttaccttaacgataagcgcgcggctgttcaagccttgagcggtcagacaatgcctgtcgtgacggtgaacgtccgggtttgctgcggttccagttgaagcaaggttccatttcgctgcgccgcgagaaaaccttcaggccgacaggtcgcgggcagggcaaaggcggcaacctgctgatcgccgttataaagaatccagcgggtcatgtaatttagctccgcgctggcgaaacgtgtcacgaacgtggtgccatccggggcgatcatactgaattccggggtatccgtgtacttgtccagttcatcggcgaagaacacgatttccgggtcgtaaaagtcaggctcgttgagcgttgccagcgaggcttcaccctgcaaaagtcgttgattaaacgccagccactgcgccgtgggtttgacatgcgccggcaccgactcgcgtagcttcagcgcggtatccgggatattctgacggaacgtggcgttcggcacataggcatagttcatgtggcacatgtactgtagcggcatggcgactgaagccaggttagtcactgtcatctgaatatcaaacagcgcgcttgttttacgcattaccaccgcaggttgcgcctgataatgatgaccgaaccccatcacatactcgtagcgcccggtcacgcgcagactgtcgccctctaactccagccaggcgtcgtccatggcagcgcagggcatctcgccgtgcagcggatgtgtatcttctggtgacgggcagccattcgccaatagtccggaatggaaagcaaagcaaccatacgttgccaccacttccgcagccggcttcggctggcggaacatgttgcgcatagtcagatcatgaccgtcaaactgcgcgtcccaaatcatctgccccatccagggcagaatcaccagatgaccgcggctgttttgtattttcagtccttccacgccgctggcgtaacgaaacgccgtaaccgtaaaatcatcattttccagcaagatacgcggctgctcgctaaaaagctcccgccataatgtaatacgtgttgtcatggttgatctcctcaggacgcggcgacttcagccaggttgccgcgcactttgctttcgcgccagaagtaaacgccaacgtaaacaaagcacagcatggaaaccaggaatgagagctgtagcgagtggaacatgtccgccacgtagccctgaatcgcgggaaccaccgccgcgccgacaatcgccatcacgatcaccgcccccgccatttcggtatgctcgttatcgacggtatcgagcgttccggcataaatggtcgcccagcaggggccaaacagaacactgaccagcaccgccacgtataccgcgctaaagctgggcgccagcgccacataggccaggaacagcgcgccgatcacagagtaaaggatcaggactttttccgggttaaagcgtgtcatcagaatgttggcgataaacttgccgataaaaaagcaggcgaagctgtagaccataaaggttgaggcatcgcgctcattgatatcgcctaactccagcgccagacggatagtgaacgaccagaccgccacctgcattcccacatacaggaactgcgccacaataccgcgacggaaacgggcgttgctggcgagatagcgtaacgtatccagcgccgaggggcgtttatgactcgcggtttgcgcgactttacaggtcgggaaacgcgtcagcaggaacagtaccatcaccactaccagaaccataatcatgtacttatagggttccagagtgttttccagcatcagcaccttgaagttgtggacctgctcggcattcatgcccgccatctgtttttccaggctttccccttcggaaaagaccagatatttacccaataaaatgcctgccgccgcgccgatcggataaaaggtctggctgatattcagccgcagcgtggcgtaggctttcggcccgatcatcgaactgtaggtattcgccgccgtttccaggaaactcaggccaatcgcaatggcgaaaatcgccgcgaggaacatggtgtaggtcgccatgtgcgacgccgggaaaaagagcgtacagccgacaatgtatagcgtcaggccgataagtatcgccactttataactggtttttttaatgaccagcgaggccggaatagcaattaaaaaataaccgccataaaaggcgctttgtactaatgccgaagcaaagttgctcagcgaaaatacacttttaaattgcgtaatcagaatatcatttaacgcggctgcgcatccccataatgggaataaacaggataacaaaataaactggaacagaggtgtcttattcagatacccgtcgggcatctgaacgatgtttttatcgttcatagtgctacctttaacagtgcagggtgattgttattcgttcaacgaaagatactcattaaattgctcaatacttggataagaggattgggtgcctttcccggtgacgctgaaagcggcaaagagaacggcttttttcatggcggcttccacatccccgctctggacgtagtaatgcgcgaaacagccgataaaggcatcgcccgcgccgctggtatcgacagcgttcactcgaaacgccggaacatggacttcctggtcacgcgtcatccacagcgcgcctttctcacccatggtgacaataatattgttcagccctttatctaccagcgaacgtgccgctgcgcgaatatggtcataggtatccactggcataccggttaatatttccagctcggtttcattgggtacaaagaaatcgcatttacaggcataagacatatctaattcccgtaatgctggcgcagggtttaataacacttcaatcccgtgtttcttgccaaattctattgcgtgataaaccgtttcaagctgaacttccagttgcagaacaataagctggcatttttttaaatcttccgccgcgcgatcgatatcttccggcgagagaaacttgttagcgcctttgatgatcagaatgctgttgctggagttggcgttgacgaaaatcggcgctacgccgctgctggtacacggtactttttctacatacgtcgtattgatcccccaggattcgagattacgaatggtgttgtcggcaaaaatatcgtcgcccactttggtcaacatcaatacttttgaattgagcttagcggccgccacggcctggttcgccccttttccgccgcagccgattttaaacgccggcgcttccagagtttccccttctttgggcatctggttggtgtaggtgataaggtccaccatgttagagccaataaccgcgatatccattttactccctctcagaaatcgtcacacgacaatgatattaaaataacattatcatgttacttccgtatcatttgtgactatgatcgcgattagaggatcattttgccatttacttcgtgaacaatccctggcggaacatacgcgcaccaaatcatttttattgttacaatttactgaaaattaactatttattgttataaaacgcgaataaacccacttttatttcctgacagccggacgtatagtagtgccacactgtaatgttctcagaaacacataaatgttactgatggaacataacaacatgatttgcggagagggtgaatggagaccaagcaaaaagaacgtatccgacgcttgatggagttactgaaaaagaccgatcgaatccatctgaaagacgccgcgcggatgctggaagtttcggtgatgaccattcgccgcgatctcagccaggatgatgaccctttaccgctgacgctgctcggcggctatatcgtcatggtaaataagcctgcgtcttcaaccaatatgccgctgccggcgaaaaagacgcatcatcgggacgaccttcccgttgcgatcctggccgccggcctggtgcgtgaaaacgatctggttttttttgataacggtccggaaatgccattagttatcagcatgataccggatgatattacctttaccgggatttgctactcgcatcgggtatttatcgcgctgaatgaaaagcctaatgccacggcgattctgtgcggcggcacctatcgggccaagagcgatgccttttatgatgccaataatccttcggcgctggattcgctcaatccgcgcaaagtgtttatttccgccagcggcgtacatgaacattttggcgtgagctggtttaacccggatgatcttgccgccaaacgtaaagcgatggaacgcggtctgcgcaaaattttgctggcgcgtcacgccctgtttgatgaggtcgcgcctgccagcattggtccgctttctgcctttgatgtcctgattagcgatcgcccattaccgacagattatgccgttcactgtcggaatggttccgtcaaagtcatcacgcctgattcggaaagtgaataacttactcaaaaaagacggcaattttattgaacatggtgggatcggactggtttcgtaccaccttcgccacgtcttccagtttatcgatctgactgatcatctgttcaagtcgctgatcgtcattgaccagaagccagatgcggctctgatcgctaccctgaatcggtaaacagagaataccctcaacgttgaaagcgcgtcgggcgaacagcccgcagacgtgggtcatcacgccaggatggttgcgaacggtcagctccagaataacgttatcatgtgattgtttctgcatggcttattcccccaccatctctgtatttgccgcgcccggcggcaccatcggatacactttttcttctgcatcaatgcgcacatggatcaacgccggtccaggacgacgaatgatagcctgcaacgccgcctgcggatcggcttcgttattcaaatcacaggtgtccagaccaaacccggcggcaatctgcataaagttgatgcttcccggataggtcgccgcaaaaacgccctgtttatagaacagactctgttgctgatgtaccagtcccagcgcgtcgttattcatcaggatgattttcacatccaactggttttcactggcggtagccatctcctgaatattcatcatcaaactaccgtcgccggaaaaacacagcaccttgttgcccggattcgccagcgccgcgccaatcgccgcgggcagaccaaaccccatggtgcccagcccgccggaagtcagccactgacgcggacggttgagcggataagcctgcgcggtccacatctgatgctgacctacgtcagtggtaataatcgcgttgtcgtccacacaggcggcgaccgcgttaatcagcccatagtgactaagcgggttattttcctggggaatactgcaagggaattcttgctgcaagtccgccaccaactgatgccatgcttcccgcggctgtgcctcgatatggggaattaactgtgccagtacatcatcgacatccgcctgaatagccacatgcggctgcttaattttgcctaactcggcgcgatcgatatccacatggatgattttggcgttcggacaaaactgctccgttttgccaatcgcccggtcatcaaaacgcgcgcccagaacaatcagtaaatcggcctcttgcagaataaaattggtactgcgcgcgccgtgcatccccagcattcctaacgacagcggatgcgccttaggcagcattcccagcgccattaaggtcattgtcgtcggcagttgcgctttttccgccagttcgcgcacgcgtgtcggcgcattgatcacgccgccgcccagatacagcaccggacgcttcgccgcgttaatcattgcggcggcctcgcggatactctccgcgctaaactccggcgggggtgatttttccgccggcgacggcaacgcatccagctcaattgtcgccgtctgcacatctttaggaacgtctatccacaccgggccgggacgccccgactgcgccagacgaaaagcatcgctcatcacctgaggcaactcattgatatttctgaccagatagttgtgcttggtgatggggatagagataccgtaggtatccacttcctgaaacgcgtcagtaccgatcatggacgccggaacctgcccggtaatacagattaacggaatagaatccaggcgcgcatcggcaatggccgtgaccagattggtcgcgcccggcccgctacaggccatacaaacagcaggtttaccctccgtccgcgccatcccctgcgcaataaaccccgcgccttgttcgtggcgcgccagaatatgacggatttgcgtactttggcttaacgcgtcgtaaacggggaggatcgaaccgccgggaatgccggtgacgatacgaatcccctggcgctccagaaaatgaacaataaattccgcgcccgtaaagcgctgaggtgtagatgttgtgcccgaacttgccatgctccattccttttattctgagccgacgttccgggaaggtgtcttaaacaaaaaaccccgcccggtttgcgccggcggggttttggaatcgtgtgtgttccggaccctacggcgcattgccgacgaccaccaccacacgcacgacgaccactgcgcgagatggcgcagttgttagtagggtcgcgttcagcatggaagggttcattaggggccttgtctgtttgttattaacacgttttatacaagcacagcgctttcagcatgacaacggaaaaattttcatctgcacaaaaatgcgtcagcgatcacatttttctacgaatttacacgctttgagtataggcgtgataagcgtagcgccctccggtaatcgccgggattgatgatcacgcatttcacaatgccggaaaacaaaaaacctcgccgaagcgaggttcttacagcgtaatgcgggtggtagccgcgaagcacactgtgttatgtcaacagcagaagtatacgcgttctgtgcagaacgcgcaatttcggcgcgaattttgatgaatttgagtatggatcagaagctccgttctgtctataaattactgttcatttatacagtacttaactataatgtctttgacacaatgtgttatgcgggggccgcatcgtaaaccggcgcaacgaagtcctggctgaaacgggtggtgccgtcagcgccttaaccccctcgtgagcacactgtgttatgtcaacacgcacactattcctcgcaaaagggatcgcgtgcgcaacagctggcaacaggcagcggaaaggtacgtcggctggcagtgctccttaaccacaggagacgcgtatgagcgtagtggatatcaccattcttatcctgaaactcattgttgcagcactgcaactgcttgatgctgttctgaaataccttaagtaattcagattcaagccgcaccgaaggggagcgggcaaccgctcccctttcaccttatccgctggtctttcgcttcccgggtatgttacgtttttatgacaccctcaacgacgcctgacgctatgaccctttccgttttctgcattttgctgttcgccgcgctgttacatgccagctggaacgccattgtcaaagcgggaaacgataagctctacgccgcgatcggcgtcagcggttccgcggcggtcatggcattgatccttttgcccttctcgccgcagccagcccacgccagtatcccttttttagcggcctctaccgcgctccaggtggtgtataccgtcctggtggcgaaaacctatcaggtctcggacatgagccagacctatcctcttatgcgcggcaccgcgccgctgctggtggcgctcattagcgttctgtttcttggcgacagcctgtcgtcgctggcctgggtcggcatcgcagtgatctgcatggcgatacttgggatggcctgtaatggccgcgccagctctcaacgtggtgtcgtgctggcattaactaacgcctgttttattgccggatatacgctggtggacgggaccggcgtaagactctccgaaacggcgctgggctatacgctatggtcattttttctcaacggcgcctgcctgttaacctgggcgatgattgcgcggcggcgggaagcgtcgcgttatctggcgcaacagtggaaaaaaggcatttttggcgggattggcactatgggatcttatgggctggcgctatgggccatgacccaggcgccgctggcggtggtcgccgcgctgcgtgagacgtcgattttattcggcgcgctgatagcctggctgttgcttaaagagaaagtggccgggctacgtctggtggcggctggcgggattgccctcggggcgattttactccgtctgtcatgatcgcccaatgacagccgcagacgtaacacattctcggcaacatttgttgccgcttttgtttacatatcctgccgttccttcgtctgccattgctggttgctgtctggccttctttttctggtgtgatagattcctctcgcatttatgggaatgcgcagcaagttattcttattttttctttttttgaaaagtaatcagcgaaatgaaaaggcagagaaacgtcaatttgttgttgatgttggtgttactggtggccgtagggcagatggcgcaaaccatttatattcccgccatcgccgatatggcacaagcgctaaacgtccgggaaggcgccgtccagagcgtaatggctgcttacctcctgacctacggcgtctcgcaactgttttacggcccgctttccgaccgggttgggcgccgccccgtaatcctcgtcggcatgtctatttttatggtagcgaccctgttcgccatgaccacgcatagtttgacggtgttgattgccgccagcgccatgcaagggatgggaaccggcgttggcggagtaatggcgagaacgctcccgcgcgatctgtatgaaggaacgcaacttcgtcacgccaatagcctgttaaatatggggattctggtcagcccgctgttagcgccgctgattggcagcctgctggataccctgtggaactggcgcgcgtgttacgctttcctgctggtgctttgcgctggcgtcaccttcagcatggcgcgctggatgccggaaacccgccccgccggcgcgccgcgcacacggctgatcgccagctataaaacgctgtttggtaacggcgcatttaactgttacctgctgatgctaatcggcgggctggctggcattgcggtctttgaagcctgttccggcgtgctgatgggggcagtattaggtctcagcagtatggtggtaagcattctgtttattctgccgattccggcggcgttcttcggcgcctggtttgccggacgcccgaataaacgcttctcaaccctgatgtggcagtcagttatttgctgtctgctggcaggccttatgatgtggattcccggctggtttggcgtgatgaacgtctggacgctactcatccccgctgcgctgtttttcttcggcgccgggatgttatttccactggccaccagcggcgcgatggagccgtttccgttcctcgcaggcaccgctggcgcgctggtcggcgggctgcaaaatattggttccggcgtactggcgtggctttcggcaatgctgccgcaaaccggtcagggcagtctgggattgctgatgacccttatgggattgctgatcctggcgtgctggctgccgctggcgtcacggatatcgcatcaggggcagacggtttaacgtttccctcgcccggcgttttgccgggcgtttcacattccggcgcgatcatcgcattgagcagggactcctgcgccggacgccacgctccttcttcgccgtcataaaactgagtgtccgcgtttatcgcatacggaatatgcgcttttttcagctcgcaggccataaaacgggcaaacgcgaactgtgaagcgaccggcgtcatttttatcgactctcccggcgcccatccgcccacccagcttgcatggccggtcttatgctgccagcgaaccgcagcgttgatccgtgcccgaatcgccgctttttccgccgccgtgcctgacgtccacggatatttaccgccgcttttcaggggtccccacgggaagatgtgccactccgccagtacatagttctggctttgcgccggcagtttaagcgccgacaaatcctccggcgcggcgcgcatgcggggggcaacgaaaatcatccgctgtgggtcaatggcgtgaatcaggcggatggttttgtcatatacgcgattcagcgacgccatattatgattaagtttgtcggcaggctcataaatgagatcgaaccccagaagcggggatgtctgaccaaaatagcgcgcgaccacgctccaccagttgatcagctccttttcatggctggcgctgggatcggttttatacgcatccgcctgataggcaataatgggtatgacgccatagtattcgcaggcctctaccagcttacgcaaatggatgaggcgcgcttccgtcggcgcgcctgccacacgaatacggacatgcgttaacccttttgccttaaaatcccgcacgaccagcggatcaaactcgcggataccccgttccgttcgcgcccagtcaacatccatcccaacgccaagctgctgcgcatagcgcgccgccgtcaaaggcatcggtttcgcatagacgaccgcgctggtcagcatgagagaggcaataagcggtttaaacacgacgccccctaaaatttttaccacggtgatagcacgtatttagcatattcactcccggcaggtgtagcgacaaagcgtaataaatcttcacacctgttcctgcaaccagcgaataaatgcctcgattttcggccactgcctgccaggcagagtggtgacataataatgctgatgacatttcagcctcatgtcaccaaaaggcgcaatcagttcaccgctgtcgagacgcttttgcaccagccgtttacgccccatcgccacgccaatgtggttcatcgcggcaatcaccgctaaatcagaacgatcgaagccaatgccggatgaatccggcaaatttactgcaaaatgctgcgcccaactgtgccactcatcggtgcccgaatcgttactccacgcctgtctgtcgtgtaagagcgtacagtgccgtaggttattcaggttatcctgcaaggcgaaacgacgggcataatccgggctgcaaacgggcaaaatcgcctcatccattaaaaaatggtgcgtgagctgcgccgacggcgcatcgtcaaaatagatagccaggtcaatgccggcacgctgtaggttaacgttatcgttgccggtcagcatagtgagagaaattgacggatagcgacgggtaaagtcccccagcgcaggcaccagccagcactgggcgatagagggacgtgaatacacggtcagcgtgccggacagttcctgatttttgatatcgaggatttcctgattcaacgtatccagcgacgatttcagcgcccagaatacccgtttgccttcatgggtaagctccactttacggtgagagcggacaaatagctggattcccaactcggcttccagttgattgatacgatggcttaccgcactggggcttaacgacagctcatctgccgccagagcaaaggactggtgtctggccgcgacttcaaaagtatagagtttggataactgccagccgttgagtaagcggtttcgggtatcgcgaaggggttccatggcaacctcagtcatcttttaatttcccgaagtgtaaaaaaacgcgctgaaaaaatccgcacatagatgaagtaaaatgaaccatatcgcaaaataaaggcaatattagatggaaatcacatagttgattcaatttacatcatgtgaatggcaaattatatcgtttgtcagggtgtgctgtttttctgtccaataagaacagattaatcacagggtaggtgagatatgcacgctcaaatctgggtagtgagcacgctgctgatcagcatcgtgttaatcgtattgaccatcgtgaagtttaaattccaccccttcctggcgttactgctcgccagtttctttgtcggcgcgatgatgggcatggggccgctggagatggtcacggcgatagaaaacggaataggcggtacgctcggttttctggccgccgttatcggtcttggcaccatcctcggcaaaatgatggaggtttccggcgcggcggaacgcatcgggcttacgctccagcgctgccgctggctctctgctgacgtgatcatggtactggtggggctgatttgcggtatcacgttgttcgtggaagtgggcgtcgtgttgctcatcccactggcgttttctatcgctaaaaagacccatacctcgctgctgaagctggccattccgctgtgtaccgcgctgatggccgtccattgcgtggtaccgccgcatccggctgcgctgtttgtcgcaaataaactgggggcggatatcggctcggtgattgtctacggtctactggtcgggctgatggcatcattggtcggcggtccgctgttcttaaagtttctgggtaatcgtctgccgttcaagcccgtaccgacagagtttgcggatcttgaagtgcgcgccgaaaacaccctgccgtcgctgggcgcaacgctgtttaccgttctgctgccgattggcctgatgctggtgaaaaccgtcgctgaactgaatatggcgaaagacggcacgttgtatacgctgctggagtttatcggtaatccgatcaccgcaatgtttatcgctgtctttgtggcgtattacatactcggtctgcgccagcatatgggtatgggcacactacttacccacaccgaaaacggctttggcgccattgcgaacatcctgctgattatcggcgcgggcggcgcgttcaacgccattctcaaaagtagcgggctggcggacacgctggcggtgatcctctcaaatatgcatatgcacccgattctgctggcatggctggtagcgctgattctgcacgcggcggtcggatctgcgacggtggcgatgatgggcgccaccgcgattgttgcgcccatgctgccgctctatcctgacgtcagcccggagatcattgcgattgccattggttccggcgccattggctgcacgatcgtgaccgattccctgttctggctggtcaagcagtattgcggcgctacgctgaatgaaacgtttaaatactatacgacggccacgtttatcgcatctgtcgttgcactggctggcacattcctgctttcctttatcatctgatcgtaaagagacgtactatggaaaacatacaaaagctcatcgcccggtatcctttggtcgaggatctggtcgccctcaaagaaaccacctggtttaacccgggcgccacctctcttgcacaaggtctaccgtatgtcggcctgacggagcaggacgtaaacgccgcccatgaccgtctggcgcgctttgcgccgtatctggcgaaagcgtttccgcaaaccgccgccgctggcggcatgatcgaatctgacgtggtcgctattccggccatgcaaaaacggctggaaaaagagtatgggcaaacgatcaacggtgaaatgctgttaaaaaaagacagtcacctggcaatctctggttccattaaagcgcgcggcggcatctacgaggtgctaacgcacgcggaaaaactggcgctggaggcgggtctgttaaccaccgacgatgactatagcgtgttgctttcgccggaatttaaacaattcttcagccagtacagtatcgccgtcggttcaaccggcaatctggggctatcgatcggtatcatgagcgcctgcatcggttttaaagtgacggtacatatgtctgccgacgcccgcgcctggaaaaaagcgaagctgcgtagccacggcgtgacggtcgtagaatacgaagatgattacggcgtggcggttgagcagggccgtaaagcagcgcaatccgatccaaactgtttctttatcgacgacgaaaactctcgcacgctatttctgggctatgcggtagcgggccagcgcctgaaagcgcaattcgcgcaacagggacgcgtcgttgacgccagtcacccactgtttgtttatctgccgtgcggcgttggcggcggccctggcggcgtcgcctttggcctgaaactggcgtttggcgacaacgtccactgtttctttgccgaaccgacccattccccctgcatgttactcggcgtttataccggtctgcacgatgccatctcagttcaagatatcggtattgataacctgacggcggctgacggcctggcggtaggtcgcgcttcgggttttgttggtcgggcaatggagcgtctgcttgacggcctctataccttagacgatcaaacaatgtatgacatgctgggctggctggcgcaggaggaaggaattcgactggagccatcagctctggcggggatggccgggccacagcgcatttgcgcctccgtcgcgtatcagcaaaggcatggattcagtcagacgcagctcggcaacgcgacgcatctggtatgggcaaccgggggcggcatggtgccggaagatgaaatggaacaatacctggcaaaaggacgctaatactcactcagtgccggaaagacggcagcgccatccggcacgccatcgcctgatggcgctacgcttatcaggcctgtgacgttaacgcagcatcgccatcaactcctccggcgagcgatgctgcttcagtaaatcccgcatcacccgcatatgcggcgaggagtagttaaaaaaggtctggtagccctcgcaaagctgatttttcccctggctatcccgatgctcagggcatccgccgccgcaaaatcgtaataaagagcacttctgacattcagcgcttagcggcaccttgtccggcgcttcagcgccattcctgccgccgcaccactgctgtagcgtctcatcaaaaaggcgaaccgagatacgctgaatatcttcacgtacccaaatatcaaatacgctatttaaaaaccgcccccagtctgctgaacacaatgaatcctcggtcaacattccgttccggtcatgttccaacaatgggataaaatggacattgcgaatgccgagccgttgtaagttacggtacagttgctgagggcgctggctattctggcgatttacgacgacctgaatctggtcatcactcacgacaatgtcctgacgtcctgtcatataaaattcccgataaatgcaataagttggcgaatatgggtaacagcaaacaggattgcgagcgacaacaccgcgagggagatcaaaaatttgtcacgcacgacatgagtttcggaaaaatcgctatgcgcgacatccatcaaattacgactcagggtataacgccaaagaatcaccgccactatcgccagaacgctgattgacacccagaacaagaaccccgcctgatgccagtggtgcctgacggctaacgccattaacgccccgtatcccagcagcgtgcgaaaccaggccagcgacgtacgctccggttgcagtcccggatcgttctgccgacgggctttacgactatccggcatacagtaccagccccatcactatcaccgcgacaatcatcaaaataacgctgatgatcaacaggctatgggtatagggcaaatcctctttcaggcgcatcgctttttcattacgtaaccagcgtagatagccataaatcgccaggccgcccgcaaacagacacaacaatagcgccagcagttcacggatcaccggcgtggcaaaatccggggcgagctgatcaagaccgacgcctgccgccagaaatcccagcgaggtgcgaatccacgccagaaaggtgcgctcatttgccagtgagaagcgataatccggcgcttctccgaggcgggaaatcttcatgacgactccttttacgttcttatgtattcccgttcgttttcagaataccactcacgttgttgctgatatgcttcacattatcccgcagcaagggaatcttattgcaaaataactgtagttcactggtgatgcgttttggcgcaaccgcgctcattgccgctatttttcatttcagttacgacctttttcaacgccaccgccaggaaaggcattattgccgaattaaaagctgaaaaaccacccgtcgcgacgaaaaaaaaggcgaagaagattgataactaactgaaaaaaattggaattatgctcgttggcattacgctgattagcgcgttcattgaggaaagagataagaagaagagcagaagtgtggccggtgcggcgcgcgttatccagcctggatttaacacagtgcgtaggccggataagcaacgcgccatcaggcgctaacccattccccaaaaaatcaccgccagcagttgtggcgtgataatacgcaggaacatcactaacggatagacggtcgcgtaagagagcgccgccgcgccgctggtggcatgaagattgttggcaaatgccagcgctggcggatcggtcatcgaaccggccagcatcccgcacagcgtcagatagttcattttggcaaaaatccgcgccagcaaaccgacggtaatcagcggaatagcggtgatgaaaataccatagccaatccagcttaatccttcgccctgcgtcagcgtatcgacaaaatcgccgccggatttcagcccaacgaccgccagaaacaaaacgatgcctaactcacgcagcgcgaggttggcgctcggcggcataaaccagtacagcttaccgatgctgccgatacgccccaaaattagcgccatgatcagcggcccgccggccagccccagttttaacgcgaccgggaatcccggcacaaacaacgggattgacccaagcagaacccctaatccgatgccgataaacaccggcagcatctgcacctgctggagtttttgctgcgcgttgccgaccacattggctaccgcatcaatcgaggctggacgccccaccagattgagaatgtcgccaaactgcaggctagcgtcactactggcgaccagctcaacgcccgcgcggttaaggcgggagataaccacgtcataacgctctttaaagtgcaaatcgcggatacgtttgccgagcactttttcgttggtgacgaccacacgctcgacgcgtaaatccgtgccacgcgtcgacaacgaggtgtccacttccttgccgatcaccagttgcgcgttatgcaggtcggtagattggccgacgaggtgcagcaggtcgcctgcctggataatcgtccccggcgacggcaccatcagcgtgtcgtcgcgtttcaggcgtgagcaaatgattttatcgctgttcaggatcggcacatcctggatagccatattattgaggttcggattctcgacacggatattcattgtctgaattaatgaatggccgttagcgagagaggattcgtgcttctgcgcctccgcctcgacgttaacgcgaaaaatcagccgcatcagccacatggtgagcaaaataccgcagatgccaaacggatacgccatcgcatagctcatccccatctgatccaccagatccactggcgttcccagatcgcgcaggatttgctgacccgcccctaacgcaggcgtattggtgactgcgccggagaaaatccccagcaccaccggcagcggaatagcgaaaattttatgcagaatcgcggtgaccaacccgcccataatcacaatcagaacagcaaacagattgagacgcagcccggaaacgcgcagcgaggcgaaaaaccccggccccacctgtatgccgatggtataaacaaaaaggatcaggccgaattcctggataaagtgcagcatatcgccactcagcgtcaccccagcctgatcgacgaagtggccgacgataataccgccgaacagaacgccgccaataccaaagccgacaccgcgcactttaatgttgccgatccataaaccgacaaccgccaccaacgccagaacgctgaccgtcaatgcgatatcactcatcttttcttccctgtgagtaacatttcaatttatagggattatgactgaaccgttaaggcatatatacagcatggcgcacattctcatgttagaaaaccgcccagacgtcctgacttcggcagcgtcttaccctttttcgtggcataaaaaaagccccgccatctctggcggggcaaggcaaggagctcattagctatttaatgcggagcgttcgttaatggcgatacgctgcggcgcaatggtttccggctcgttgcgggttaaatcaatatgcagcaggccgttggtaaacgtcgcgccggaaacttccatattctcagccagcgtaaagctcaggctaaaaggctgcatgaccaggccctgatgtaaccatttgggctcgttttccggctgttccggcgtacctttcaccgtcaggcgcgtgccttccagttgaatatccagatcttcctgacggaaaccggctaacgctaaggtaatgcgataatggttatcgtcgcttttttcgatgttatagggcgggaagctctggctttcgccgctgttttgcagcgcattggccagcttgtcaaaaccgatccattgacgcagcagtggggataaatcgtagttacgcataatcatttctccttctaagaagcgagtttttaccttcacactttacgtgcgaatatgctccctgacggcgagcatgggatgacaggccgcgcaacgcgacccgacggaatcagttaatttcgatacggcgcggtttgttcgcttccggaatcacgcgctccagttcgatatacagcagcccgttgaccaggtttgcgccgcgaacgtgaatgttctccgctaactggaacttacgttcaaagttacgctcggcaatgccctgatacaggtaagtacgttctttctgctcgtccgcatgagcgccttttaccaccagtaaattatcctgggcagtaatctccagttcgctttccgcgaaaccggcaacggcaatggcgatgcggtagtggttttcgtctaccagctcaacgttgtacggagggtagccgccattactttggctttggttattttcaagcaggttaaacagacgatcaaaaccaatggcagaacggtacagcggggataaatcaaagttacgcataatcataaactcctgaaatcagcgagaatgtcagaccttccatcatggacaggccaggattgccagaacacccatcaggcgtgcccttctattcactacgtcttataaatgggtctgaatacgtacttttcaagtattttaatccggcttttttttgcagtttattggctattgcatagactggttgggacagcactgattgttaaagtgcgattaccgccacagtgccacgtactggtgatgttatttttagcaacggatcgctataactcatcatgcaaataacgacaaccaacagatgaatgagtgatgataaaaaacgtgtggttaacgctgataatatggaatgggatgcttttattaagcggttgttcaagcgtcatgtcgcacaccggcggtaaagagggtacttatcctggcacgcgcgccagcgctacgatgatcggtaacgatgagacaaactggggcaccaaatcgttggccatcctggatatgccatttaccgccgtgatggatacgatccttctgccgtgggacatcttccgcaaagacagttcggtaagatcgcgcgtagagaaaagcgaggaggagacgaaaatgaccaatgccgtcatccccccggcgaagatgcctcctccctgatttatcgcccggtttccgtcacccatagctgacggaaccctttcacctcttccatccatgcgacgtgtcgcccatccggtgaaaaaacgacggcgtccgcagacggcgggttgtcgtgcctggcggttaagaagtcgatcctcccactttgtgcgtcgcagcaggcaatccggttttccagcaccagtcccagccatttacccgacggatgccagttaaacgctgactgtacgccggtcgcatgatgcgttaactgccggggctcgcctccctgcggcgatatcagccacagttgcgctacgccgttatcgtcccgcatcaaaaaggcgatcgccgtcgcctgcggattactgcggacccagtggcgtggttcgttagtgagtccaggataaacacgctggtgagtaaaggtaagacgccgctgaactacgcccaacggcggcgatggcatcgttgattcggttcccgtcagcggcgtgtcgcctgcctgtttccagccgttttcatgacacggtaaatcgacaataaacagctccgggacttttttgcccgtcagcgacagcgtatcgccaataaaggcgatctggcggttgcccacccagccctcttcataggcgcggttaatgtcatcgctgccaggtctcggcgcaggcgtcgtgcggctaaccagtacgcaccagtagctaccgctgtattcgcgcggatgctgaaccggtaccgttaccggcccatacggcacggccacgccgacattacgtagatccagcgccggatctcgctcatgcagaacgtggtcattataggtaaaactcaccagctcgccgttcgggctaaacacatggacgtgactgccgccgcgcagcgcgccgggagtatacggcgcagtaatatccatcgcatcgaggttagtcacgccccccggcgttgcaataacgccccggcggtggtggaaatcgtaatgccacgtctcatcagggttttcagggccatgaataaacacatagtgattgtcggcaggatgcaccgtcaccacaccgacatgcgcgccctgcacagcgcgataaatcacctccacgtcgccggtatgcacattgacacgctcaatggtcttgcccgtaaatgacgcgcctgaaggccgtacatcaaagaccagccactggctgtcaggtgtccaggtattggtgttggtaagctggtgatggcgcggcgtaaaagtgatttgtttcatgggatgtcctgataagagacgatgctcgtcatcatactgcacacgggcttcactttcaggctttagcgtatcgttgggatagccaggcccgatggcgccacgccaccgggccgtcagggcattatttctcctgcgccagccggatactgcgctctatcaccgcccgccgggcgtcacccgccggcagcagcttcagcatcatctcccaggccgccaccgcctcgccaaagcgctgctgctcaaaggcgttaaacgcatacaggcttaacacccggatatccgtgtggtcgcggctcaccagccggcgcagcagctccccgccgcggcggttatcctccgggtcggacgagcgcgtcagcgcctccgcgtagcccagcgccgcatcgcggtttttcgggtccagacggtaagcgtttgcataggccccggtggcggtaccggcattacccagtaccataccggtgcgccccagcatgagccagccctcaacattgccggcatcattctgcaggcgggtgcgcagccccagcgccagccgcgccatctcctcctcattcagcggctgcgcctgcgggtccagcgcccgcgccagcagtcccggcgtctgcgccgttgcctgctgccaggccctcacctgcggatagctgccggtctgtgagtaactgatggcggccacgaccagcgccataaccacgcccggcacgtaagcaccccacccggcgcgcggtcccgccgcaggaatggcgtcggccaggacgtcctgtctgatacgcacccgccggcgcgtgcgggcgacgattatccacccgcccgccacgatggtggccagcggcagcacccacagcagcaccgtcagcggggtcagcggcgggtcgtaggtgacaaagttgccgtagcgcgccaccatgtaatcgatgatttcctggcggctcttcccctcctgcatcaggtcatacaccctgcggcgcatgtcggtggctatcatcgcgttcgagtccgcaatgctgttgttctggcatttcgggcagcgcagctgctccgtgagctggcggaactgctgctcctgcgcttcatctttaaacggcatcacgtcggtggtcgcccgcgctgacccggcgataaccagcaccagcatcagcatcaccatgcccggtaacagtctcattgcgccgcctcccggctgtatctgtcccacagcggtttcagttcactttcccatacccgggcattcaaatcgcccgcatggcggtagcggataatccccctgccgtcgatgaggaaggtttccggcgcgccgtacacgcccaggtccagccccagcatcccgtcgctgtccgataaactcagcgcatacgggttgcccagttcctttaaccaggccaccgccttcgcccggtcgtccttatagttcagccccaccacccggataccctgcgcagaaagctggttcaggtactgatgctcggcgcggcaggtcgggcaccaggtggcccagacgttaagcagcaccggtttcccctgcgtcagcacctccgcctgatagtactgacccggcgtctccagtgattccaggcggaacgccggcaccggctttccggtcagcgccgattcgagattcgtcgggtcatccccctgcgcgttgcgcgccagctgccacagcagcgccgcggcaatcagcagaaaaatcagcagcggtaataacagtacgttgcgtttcatccggcctccggcaatggtttacggcggcggtagcgcgggtccgccaggcacagcagcccgcccagcgccatcagcagtcccccggcccatatccagcggacaaacggtttgtagtacaggcgcacggcccacgcgccgttgtccagctcctccccgagcgcggcgtacaggtcgcgggtcagcccgccgtcaatcgccgcctcggtcatcaccatccggctggtgttgtagagccgtttctccgcgtgcagcaccgcctccggctcgccgtggcgcgtcaccccgatgagggccaccccgccgcggtagttgggcccggtgatgtcccgcacctcccggaaggtgaagcggtagtcgtgaatggtcacgctgtcgcccgcccgcatccgcacgtcacgctccacgctgtaattctggctgaaggcgatgccggtaatcgtcaccgccagcccgaggtgcgccgccaccattccccagtagctgagagaggttttcgtgccgcgggacacgcgctgtacggcttcggccaccgccagcaccgcaatccagcaggccatcgccatccccaccgccgtcatggcgatgattttatcttccagcagccatggcaaaagtaccgacagcaccagggtggagaccagggcggtgagcagcagcgtcctgatgttacgcggccggtcccggccccagcgcaccagcggccccacccccagcagcagggcaaaggggaccatcagccaggtgaacatggtgttaaagaacggctcccccaccgaaatgctgcccagccccagctgtttgtgcaccagcggcagcagggtgcccagcagcaccaccagcatggcggccatcagcaggacgttgttgccgagcagcagcgactcgcgcgaccacagcgcgttgttcacccgcgaacgcaccctgtgcccgcgcacggcgaacagcagcagcgagccgccggtgaccagcaccataaaggcgaggataaacatcccgcgcgccgggtcggaggcgaaggcgtgcaccgacaccagcaccccggagcgcaccaggaaggtgcccagcaggcacagcgagaaggcgcagatggacagcagcagcgtccacgccttaaagccggcgcgctgttcggtgaccgccagcgagtgcagcagggcggtgcccgccagccacggcataaaggaggcgttctccaccgggtcccagaaccaccagccgccccagcccagctcgtagtaggcccacgccgagccgagcacgatgcccagcgtcaggaacacccacgccgccagcgtccacgggcgggcaaaacgggtgaacgcgctgtccagacgcccgctcagcagcgcggcgatggcgaaggcgaaggccaccgagaagccgacatagcccatgtacagcagcggcgggtggaaaatcagccccgggtcctgcagcagcgggttcaggtcgcgcccctccaccggaaaggccggcagcgtgcgggcgaacgggccggaggtgaacaggatgaacgccagaaaaccggcgcagaccatccccatcaccgccagcacccgggcgacgatatccgccggcacctgccggctgaacaccgccaccgccagggtccagccgctcatcagcagcacccacagcagcagcgagccctcgtgcgccccccaggtggcggccacccggtaccacaccggcagctgcgtgttcgagttgccggcgacataggccacggtgaagtcgttaaccacaaaggcgtgcaccagcacgaaaaacgcgcccgccacgcagataaacagcagccaggcgaacaccccggccgacgccatcatccgcgcgtcaccgcgcgccacgccccacagcgggtaaacggacagcagcagcgccacgccgagcgccaggcacagcagcgcgtggccgtattcaggcatcatgatgaggtgtccttatcagcgcgttgcgggcggcggtggttttcctgcatcgccttttccacttccggcggggtgtagttctcgtcatgtttggccagcacctcgtgcgccaggacgtggttgcccttctccagggtgccctgcaccaccaccccctgcccctcgcggaacaggtccggcagtatcccctcatagctcaccgtcaccgacccttcggcgtcgtagagactgaagttcaccttcagcgagtccgggtcgcgcctgacactgccgggcatcaccatcccgccgacgcgcaggcgctggcccgccgccggcagctgctgcgtctcgcgcttgccgtagaggatttcgccgggggtatagaacaggtcgatattcgcgcgcagcgcgtacaggaccagggcggtggtcagccccaggcccgccagcaccgcgcagaccacccatagccggtttttacgtcgcaggttcacgcggcctcctgttgcgcctgtgcggcacgcatccgcgcctcgcgcgcccgctgctgcgccacgccgcgcagaatggcccggcgctgcagcaccgtgtgcagcgccagcagcgccagcggcgccacggtcatcgccaccgccagccagacaaaaaaggcgtacccgcccatggcgaaaaaatcgctccacgatgaaaatgccggactcaccggtgcccccttttcagtatcagttcgctcacccacgggcggcgtttttccatcagtaaaatcaggttgcgcatccgcatcagcgaaagcgtcataaagagcagcaggtagccggcgatggcccagcgcagcggcgagcgcatcgccgggtcgatactctgctgcatccgcgtcgagccctggtgcagggtgttccaccactcgacggaatagtggataaccggcaggttcaccacgccgaccagcaccagaatgcccgccgcgcgcccggccattttacggtcgtcaaaggcgtgccacagggcgatgaccccggcgtagagaaacagcagcaccagctccgaggtcaggcgcgcgtcccacacccaccaggtgccccacatcggtttgccccacgccgcgccggtgaccagcgcgatgaaggtgtacaccgcccccaccggcgccatcgccgcgacggcaaggctggccattttcatctgccagaccagcccggtgaacgccgccaccgccatcgccgcatagatacccatcgaccagatggccgccgggacatgcaggtacataatgcggtagccctccccctgctggtagtccgccggggcgaaaccaaagccccggacccagcccgtggccagcacaatgatgccggccgccgccagccacggcacgagcctgccgcaaatctgatacagccggggcggcgccgccagctgatgaagggttttccacatagtcgtcacctgacctcctgaaaccagtaaaatgtccgtcgcgccggggcgctactgcacgctgaggcgcagcgccgccgcggtggcgaacgggcttaacgtcgcgctgcccgccagcagcgctcccagcaccgccagatagccgtcagcgggtaaatgcatcgatgccgcgtccatcgccgcggcggcgaaaatcagcaccgggacactcagcggcagcaccagaatgcccagcaggacgccgccgcgccgcagcccggccgtcagcgcaacgcccggcgcggcgagaaaccccagcgccggcgtgccgagcagcagcgtcagcgccatgattttccagccgtacacgtccatccccagcagcagcgccaccagcggggagagcataatcagcggcaggccggtcaccgcccagtgggccagcaccttcgccagcaccaccgccggcagcggcaccggcagcagcatcagctgctccaggctgccgtcctgcaggtcgtcgcgaaacagccgctccagcgccagcagcgaggccagcagcgccgccacctggatgatgcccggcgcgatacgcgccagcagctgcggctgcggcccgacgcttaacggaaacagggtgatgaccatcaggaagaaccacagcgggccggcgatgtccgcgccgtggcggaacgccacgcgcagttcgagacagaagacacgccacatcacagcccggcccccccgccggtcagcgccaggcggcggacggtgtccgcggcccccggcagcggctggtgggtggtgagaatgaccatcccgccctgcgccgtgtgcgccgccatccgccgggtgaggcgcgccacgccgttaacgtcaatggcggtgaacggttcgtcgagcacccacagcgcggcgcgggtcagccacaggcgggccagcgccacccggcgctgctgcccggccgagagctgagcgaccggcacgtcctcaaatcccgccagcccggcctgcgccagcgcctccgggagacgcgcgccgtcgccggggtggaagaagtgcaggttctcccgcgccgtcaggcgggttttgatccccggctggtgccctatccacagcagactgcgatggaagctgtcgcgcacgcggcgcaggggttcgccctgccagtacacctccccgccgtccgggcgcgccagcccggtcagcaggcgcagcagggtggtttttccggcgccgttgccgccggtgacctgcacccactccccggcctccacggtgaacgacagcccgcgaaacagcgtcctctcgtcccgctcgcagtacagatctctggcttcaagcatcattgtcattgcgcatattcaggttgatatggcgtataaacaccggtcaggctttccaggaaggcgacgatatcgtcaatatcgttttgcggcagatcggtgccaacctgataacgcagcatcagttttaccgctccatccagcgtcggtacgtcgccccgatggaaataaggcgctgttaacgcgacgttgcgtaagcccgggactttttgccgtaatttatcgcgaacctctttggtgacgttcatacgaccaatatccgctgcggtaatttcgccaaaattaaagtctcgctttaatcccaatggttcaaaagagcgcccgcctaaaatgataccgccgtgacaggttgcacatttattctctttaaataattgataaccgtgtttctgttgcgcggtcagcgcattttcatctccacgtagccatttatcaaaggcggaatccggcgttatcaacgttttttcgaattcggcgatcgcatcagtaatattttccccggtaaatccttgcggataaaccgcctggaaatcttttttcaggacaggatctttatcaagcttgctaataatttcatcccaggatttagaggccatttcaataggatttaacggtggtcctcctgcttgctcctgcagggttgcagcacgaccatcccaaaattgttcgatattaaatacggagttgaataccgtcggcgcatttattggtcctaccgcaccgccaacgccaattgaggtttttctgccatcgacaccgcccgcatttaacgcgtgacaatgcgcacaggatattgtgctgtcgccggataaacgttcatcatgataaagccggaaacctaagtcgacttttttcgcatcgacgggaatattgcgcggaataggctgaacgggttcattccggtgcgccgggtcggtatcggcgctggcatagttgcgctcacgctgatcggctatccagttcaggatgtcagtacgctctttatcgctgacgccccccgcccagtgcagcgcgacatagcgggttggcggcatagtctgatgttgcataacccattcaattttattcagttcgctttgcggcaccggcgtatccgcaatcagggcggcccgtaccgcctccaggttaaacgacttgtagccgagctggatatcgtaatccattagctgctttgccaccggaaaagaggaataaaaaggcaattcagcggaaggcgtatgacaataatcacatcctttctccctgaaataacccagtattttattattttcacccacaaccgaggcctgcacatcgctttttttactgcgctgtttgtcgtaataccatacatacccggacaaacctaaataacataacagcccaacggtgataactgttgtcgcatagagggtaatttttttcatatcactatccttatggggtattgcggcatgattaattaaattttatttttttactcatgaggcccgtcaatactaaatacaaacccatcatggatattgattggtatcaataattacaattggctaaacctatagatatgataacccccgactatcgtaagatttattttgcgatgtccgtcacagggtttattcagcagcaacaatggataaatcctcttttccgtcatcaaaacgaacgatagccaacaataattgacttaacgcagcataaaagccatagggatcatgcttaaggcaattatttgtaaattccggaagccattccagtaatgacgacaatgttttctggcgtaatttattcattctccgttgttggaacgattcacccaatgaaaaatgtaaatggctgagtaattccagataaatcgccaggtggtcggtcggctctttaaaatcgtcgttgacttccatcccggcttcaagcaataaatgtttaatcatgccgggttcctgctgcgggtattgcgaggcgtagggcaaggccgattttttatccgtcatcaggaacaatccgcaaaaatctgcggccagctccagctgcgcatcctggcgcaggctaagcgcggcaattttttgttcgagtaacgccaccgacgccgccagcgcaggctgacgctttaacagcgccagccagtccgcgatctccgcggactgtaattgtattaacccttcatcatccacttcccggaaaaagagtaacgccagccatgcatatacgcaggcgtactgttcctgagcaagcgctggctgcttaatcatgcggattcccctgcgatgcgggtacatattcacactgcgcgaccatctcgaccggaccgttaaacgccgtgacgttatccatagggccggtatatttttcaatttccaccagcgtcgtatgcgcgctggtcgcctgcgcaagctgtgatgtaccgatatccagcgttaatacgttagggttgccgtacttacacaacgcgttgagatcgccgcctttatcaggatcgtaccaggcgccttcatgaattcgcgccacgcccggcgcatagcgatcggaaactaccgctcccgccagtacctgcccgcgtgcattgaatacccgcacgatgtcaccgttgcggatcccgcgcgcgctggcatcctgtgggttaataaagaccggctccttgccgccaacggcatattgctgacgcagcgtttccgactcgcacagttgggaatgcagacggaaatcagggtggacggattgtaagtgcagcggccagcgctgcgatcccggcccgccatgcgagcgttcgattttttcgaaccacatgggatggccctgacaatcgtcgtattgcatgtcggcgatggttttggagtaaatctcgatcaaaccgcttggcgtgcccaacggctccaggtccggatcttcacggaaagcctgatggcgtacaaacatctgcggatgatcaaactcgatgtactcctgttgattccagaacacctcgaaaatcggtaagtggataccgcgaccttttccctgctggctcccttcctgccagatgcgtttcagccagcccatttcatcaagaccttccgtgaatgccgcttcacggttaaagcgtcggcagagatcgcggaaaatatcaaagtcgttacgcgcttcaaactgcggcgacaccacctgtttcatggcgataatgccgcggttagagtggttgccgaactgatcgaggtcgttacgctcaaattgggtggtagccggcaaaacgatatccgcaaagcggcaggtcgacgtccactggttatcaatggcgatgaccgtttccagcttgcgccagccttcaattatgcggttaatttgttggtgtcggtggaacgggttggtcccggcgaacacgcacatcttcagcggcggtaatttaaccgatttgccgttccagttaatgatcttgcccggttcaagaatggcatccataaaacgcgcaataggaatggtgctgctgtagcctttgtaatccgtgctgtcgtgcactggcggaacggtcgtcgaaccggaaaagccgcttaaaatgatccctttacgaccaggcgtcccggcgccgttatagtgccagccaaaaccaaagccgccgcccggtaaaccaatctgtcccagcattgccgccagcacgacgaccatccatgaccactgttcgccatgctgcatacgttgtacgcaccagccagcgatgatttgcgttctgtcgcccgccatctgccgcgccaacgcgcggatggtgtcggcgtcaataccgcacagtttttccgcccaggcggcatctttgggctgtccatctttctcgcccagcaaataggggaggaactggtcaaaaccgacgcagtagttatcgaggaaatttttatcgtacagtttctcgctgtacagggtatgcgccagcgccagttgtaacgggacatccgtctgcgggttaatggcgatatgtttgaccttatcgcgccccagataatcgtgcgtggaggtgacgaccgggtcgatgctgatgaccgagatagcgccgctggcaaccttctcttttaattgttcatagtactgatagacatcgtgatccgggcaccaccagtttgcctgctggtttttcaccatatcagaaccccatagcacaatcgttttactgttctgtaaaaccagaggccatgacgtttgctgctcgtacacttccattgaacccaccacgcgcggcagaatcacctgcgccgcgccggtcgaatagtcccctcccgtgctaacgctattgccatgtagcgcaatcgcgcgcgccagcatcccggaggcgttatggaacatgccggtagattgccaaccgctcgccgtcagtagcgcgctcggcccgtaggttttttgcacccgctccagttcctgatagaacagatccagcgcttcatcccaggagacgcgcacaaaacgattatcgccgcgctgcgaggtgtcgctttgatgacctttgcgcatccagtcgacgcgcaccatcggatagcgaatacgcgccgcgttgtggacgtgatcgggcaggccggcgatcattttggacgggtatttatcctgttcaaacggttttgccgccacaaatcgaccgtcaaccaccgtggcgcgaatcgccccccagtgagaaccggtaaggataccctctttcgtcgcggcgcctggcgcaacggcatccgctgcgcgggcgctacggggcgtcagtagtgacggccccagcattcctgccaccgtcaagccgccaagctgcgccagaaaacgtcgacgagagacgtgtaacgagtccttatttttcattgtgttctcccttatcgctgtgcggcgtgttggtggtatcagacgcattcatctggagatatttcaacaaggtacgttcttcacgcttatccagactggtgaaaccgatcatgccgttgagcgtgccgatccagccgttagcgtcaaagtgcgctttgtccggcgcgccgtgacactgattacaggtgccgttatagagggagtcggcataggcccaaatcggtttaatgtcatttaccatgtcgcctttttgcatccacgcagttgcctgtaatttgctccactgagtattggtcgccgcgacggtggtctcttccagcgttttcacatgctgttgcacatcgccgcgaatcgaggcgacaaaaatacgtttaccgggcaactgcgtcagcacgcgctggcgaccgtccgtctccgtccagccttcgatttgcacttgcagccagtcaccgtcccgtttaaggactttcacttcagaagcaggtaacagcgaacctgccggttctttatcgcctttagcggcgtaaatcggcttgatatccagcgaatagagcgtatcgccgtcattatgcgtactggcgctggcgcgcagttcatcaaactgtttgcggaaaccgctgctcatatccggtagctggtgggcaatccctttatggcagtcgatgcaggattgattttctttcgcggcgattttcatttgccgcgccgcttccgggttctgtttcgcgtgatccatcgcatcgtagttatggcaggaacgacaggtcgcggagttattctctttcatgcgcgcccattcacgctcggcaagctcggcgcgtttggcttcaaatttttccggggtatcaatcgagtgggcgataaatgtctggtaaagatcgttgctggcttccagcttacgtttcaccatgcctggaatatcaggggggatatggcaatcgtggcattccgcgcgtacgccggaagcgttctggaaatgtacggactgtttatattcctgatacaccggctgcatactatggcagctgacgcaaaactctgtcgtactggtcagtttgataccgacgtgaggtaacacgatcagcgcaacgccgatcacaatcccgacaatgaccagcgccagtatcgaccaacgggcgcttggcctgagtagcgctctccagagttttcgcataatagcccctgtaattatatggtttaatgcgcagatcttattccgcaaatatgaacagcgtcactggtcaggatgaacgggatacggcaatatatgaacagatatgaacagaaagagaccgcgcgcaggatgtcacatcacattgttattgttgaggatgaacctgttactcaggccagattacaggcctattttgagcaggaggggtatcgcgtttcggtgaccgacagcggcgcgggcctgcgtgacatcatggagcatgagcacgtttcgctgatcctgctggatatcaacctccccgatgaaaacgggttgatgctgaccagggcgctacgcgaacgttccacggtgggcattattctggtgacggggcgttgcgaccaaatcgaccgcatcgtcgggctggagatgggcgcggacgactacgtcaccaagccgctggaactgcgcgagctggtagtgcgggtaaaaaatcttttgtggcgtatcgatctggcccgccccacgccgcaaaatgccagtgaaaactgctatatgttttccggctactgcctgaacgtgatgaatcacacgctggagcacaacggtgaagccattaagcttacgcgcgcggagtacgagctactgctggcctttgtgaccaacccaggcaaagtgctgcatcgcgaacgtctgctgcgaatgctttccgcccgccgcgtagagactccggatctccgcacgattgatgtcctggttcgccgcttacgtcataaaattacgccggaactgctggtcacacagcatggcgaaggctactttttagcctcggaggtgtattgatacagatagacgggccgaaatcccggaggcgatagcgaacggcgaacgcgcgcgctgtcggcgttgttatgcgtcaaaataagcaccggcgggctgatattttcaggcaccggttgcccctgtaagaccttaatcgactgcgttatcgctaattctccctgccaggccatctgatcgctgagcgccatcaggatatggccgcgttttaaaccgcgataaacctgatgcgtcagataaaatgagacgatcgtgagcggagtcgtcaaattacgcccttcgcccatcgccgcctccgccgctatcgccgacccggcgaccacattggcgtccggatggcgttccagcatttcctggagtaagtttcgctgcacttcaatgtcgttatcgccccaggcgatatccacaatgttgatggcgctgcctttaattgcctgacgaaaacccgccaccatctcctgactgccgccggcttcttccggccccgggaagagtaaaacgttaagcgcttttcctttgctccactgcaccaggaaacgtcccggcagataacccatctgaaaccacggcagaccgacgtgagttgccacgctggcgtcgcgtatcacgttcgccacttcaataaccggcacattaccggcataccgttccagttccgggaaacgaatggtactgctgccaagcagaatagcgtcggcgccccactcccggcactgcatcatttgctgttgttgcgtcgccagttgccgatagccattcgcttccagcacttttaaatcaacgccatacaatttggccgctttttgcatcccgtagttgacggacaaccagtaagaatctttcaggctggggtataatgcgcacagtttccagggtttactcgcattgactgacgtttgccgccagggaatcgcccgatcggcgcgcgtccagtgtagcagtccggtttcggctgacgccgtttctatattcgagacgatgattatcaaaaaaaagaacgaaataagcgcgcgcatgatagccccaccagcaacaaggttttatcctaatggtttttccggcggcaactcaacccatttcacccgcggcgcataaatgtcaacgccttcactgacccgcagattatggctggccttcgccctgatggcggcgctcaccctgctcagcaccgtgatcggctggataagcctgcgcgtcattagtcaggtggagcaaaccaatacgcaagcgctgctccccacgatgaatatggccaggcagttaagcgaagccagcgcttacgagctcttttccgcgcaaaatctgaccaatgccgacagtgagggcgtttggctggcgcaggggaagatgctgaaagcgcaaagccttaaaattaaccatcttttgcaggcattaagcgagcaggggtttaatacctcggccatcgcccggcaagaaaaagagattgcacaaacgcttgggcaacagggaacgctggtcggtgaaattctcacgctgcgcgcacagcaacagcagttaagccgccagattgcggaggcggcggaaagcattgccgcccaggctcacggtcaggccaataatgcagcgacatctgcaggcgccacccaggccggtatttacgatcttatcgaaagcggtaaaggggatcaggctgaacgcgcgcttgaccgactgattgatatcgaccttgagtatgtgaatcagatgaatgagttgcgggtcaatgccctgcggtttaagcagctcattgtgaccttaaaagacgcgcaagggctgagcgatgccgaagacaccgatgaaaaacttaatcagttggttaaaattttatcccgccgccagcagcgtatagaagatcctaccgttcgcgcccaaatcgccgacgcgctggagacaataaaccagtacaccacactggttaccctgtttcgtaaggaaaacgccatccgcgaccagcttcaaacgcttatggccaataacctctttcagtttacccgcttcagtacggaagtgtcgcagttggtgaacgccatcgaaaaacgaaacgaggctgggttagcgcgtcttacacacgccagtcagcgtgggcaaatagggttagtgatcttaggcatcctggcgctgtgctcattaagttttattctttggcgagtggtttaccgctccgtatcccgcccgctggcgcaacaaacgcaggccttacagcggctactggagggcgatattgactcgccatttccggaggcggctggcgtcagcgaactggataccatcagccgtctgatggaagcgtttcgcgccaacgtgcgcaaattgaaccgccatcgtgaggatttggcggaacaggtgcgatcgcaaacggcggaacttcatgcgctggtgctggaacaccggcaggcgcgcgccgaagcggaaaaggccaacgaggcgaaatcgacgttccttgccgccatgagccatgaaattcgcacgccgctttacggcattctcggtacggtacaattgctggccgataaaccgctcatgacaaactaccgcgacgatttacaggccattaatgattcaggcgaatcgctactggcgattcttaacgatattcttgattactcggcgattgaagtaggcggcaccaacgtttccattagcgaggaaccgtttgaaccgcgacaattgttgaatagcgcgctgcatttaatgcacagccgcgttcaggtggcgctcatcaccgactttagcgagcaactcccctcaacgctacaaggcgatccgcgccggatacgtcaaattgtgattaatcttttaagtaatgcggcgaaatttaccgatcgcggcagcatagtgctgcgcacgttttgcgacgatcagagctggtttattgaggttgaagataccggatgcggtattcctgaagcgaagctgacggctattttcaaaccgtttgtgcaggcgacaggacgccggggcgggacgggcctggggctggctatcagcgccagcctggcagaggcgatgggcgggacgctaaccgtcaccagtacgcttcatgttggcagttgttttcgtttacaactgccggtttgccactccaaacccgcaagtaaaagtgcgttcagggaaccgataaatcttaacggactacgcttgttgctgattgaagataatatgctgacgcagcgtattaccgctgaaatgctcacgggcaaaggggtgaaggtctcacttgctgaaagcgcgaatgacgcgctacgctgtttagccgaaggcgagtcctttgatgtcgcgctggtggattttgatttgccggattatgacggcttaaccctggcgcagcagttgatgagcctgtatcccgccatgaaacgcattggttttagcgcacatgtgatagacgataatcttcgtcagcgtaccgccggtcttttctgcgggattattcaaaagcccgttccccgcgaagagctttaccgcatgatagcgcactatttacagggcaaatctcacaacgcgcgggcgatgttgaatgaacatcagcttgccggcgatatggcgtctgtcggcccggaaaaactccggcaatgggtcgcgttattcaaagacagcgcgctgcctttagtcgaggagatcgaggcggcgcgcgccatgaatgacgacgttaacattaagcggctggcgcataaattaaaaagcggctgcgccagcctggggatgacgcaggcaaccgaagcctgtcgggaactggagttgcaaccgcttagcgatatagatattaaaactatcgtgacgcagggagtgacggcgctcgacgcatggatagccggtcatccttcgccataatgacttccggctcgccacggccaacttatccgacgcgtttcacatcgcccactaacaggatgtaagacagcgcgcccagcagggccacaacggagatatagaccagcgccggagcaaaaccgtagctttgcgccagataaccaatcactaacggtacgctaatcccgcctaacccaccgataaagttaaacataccgccggtaaggccaatcaaccgcatcggcgcaagggaagagattaacgaccaggtaatggacgcaaatccgttgccgaagaaagctatcgccatcaacgccataatccacaacggatcgttagtgtagttagcgcccataatgcatgtggagatgagcaaaccgcaaataatcggcgttttgcgcgccacgcccagcgagaagccttttttcaccagtttatccgccagccagccggagagcagtacgccaaaaaaggcagccaggaacggtacggtcgtcataaagcccgcttttagcgcggtaatgcctttttcctgggtcagataattagggaaccaggtcagaaagaaccatagcgtagagtttacggcgaactgaccgaggtagacgcccaccagcttacgatggaacaccagtttccagtcggctttcgtcagcggctggcgggcctcttttttcgctggcgcatcgccatccaccagaccaccgccatcgcgaatatactccaactccgcctggctaaggcttttcgtcaaacgcggcggttgataaaccttaaaccagaccaatgaccagataatcccgataccgccggtgacgataaagacccagtgccagctcagcatttcctgaatccagatcagcagcggcgtaaggaatgccagtccgacgaactgtccggaggtgtagaacccgactgcggatgcgcgctcatgctccggaaaccagctagtgaccatccggttatttgccggaaaggccggcgcctcgaaaatcccggtaatagcgcgcaggccgataagcgacaatagtcccgtcgcaaacccctgcaatagcgttgcgactgaccagccgaagatagcgataaaataggtcagccgggacccaatacggtcgagaaaccagccgccggggatctggcataacgtatagagccaggcaaaagcggagaagacatagcccatttccgctttggtaatgccgaattctttttgaatatgcatggaagctacggcaaggttggcgcgatcgacgtagcaaatcaccacggtaataaagatcatcaccagcgtcagatagcggcgacgccccggctgtgctgctgtaactgaaatatccatcgtcatctgtctccagattctgggcatagcgaggccgctcaccatgccctgtaaattacagagggtgtgtttttatatttaaattgggttgcccggagggcgacgtttgttgagcctacagcgtggcgatcaccactcggctaccgatccgtcagcgtgccgccacaacggattacgccagtccggcgcgcttttgctaagttcaatcaccctggcctcgtcaatgtctacgccaagacccggtttggttaagggtttaaagaagccgccgtccatgctgaagtcttctttatttttcacaaagtcgagcagctccgcgcccttgttatagtgaatgcccatactctgttcctggaataccgcgttgcgcgaaacaaaatcgatatgcaggcaggcagccagggcgattggacccagcgggcaatgcggcgccagcgccacatcatatgcttccgccattccggcgattttatagcattcggtaatgccgcccgcgtgggataaatccggctgtagaatcgccagcccacccgcgtccagcacgcgtttaaattcaaaacgcgagaacatacgttcgcctgcggcaatcggaatatgcgtttgcgctgccaggcgcggataatattccgcctgttccgccagcaccggctcttcaataaacagcggacgatagggttccagttctttaatcagcaccttcgccatcggcgcgctaacgcgaccgtggaaatcgagcccaaactcaatttcactgccgaaagcttcgcggatttgcgccacggtattgaccgccgcatccaccgcacgggagttatcaatcacgcccatctcttcacagccgttcagcttgaaggtgtcaaaaccaataccgcgcaatttttcaataccgtcaatgacgtctgccggacgatcgccgcccacccagctataggccttgattttgtcgcgcaccaggccgcccatgagctgccagaccggcgcattcaacaccttgcctttgatatcccacaatgcctggtcaataccggcgatggcgctcatcataatcgggccgccgcgataaaaaccggcccggtacattacctgccacaggtcgttgatacgcgccggatctttccctatcaggtagtcggcaaactcatgtactgccgcctctacagtacgtgcccgaccttcaatgaccggctctccccagccaaccacgccttcatccgtttcgattttcaggaacatccaacgtggaggtaaacggtacgtggtgatgtgagttattttcatttcactgcctctcgatacgcattaacaaatgccgcagcctgctgcgcggtgcgttcaacggattgcccggcgcgatagagatcgctacccaatcccgcgcccacacagcctgctttaatccattgcgctaggttttccggcgtcacgccgccgacggcaaatagcggaacatccggcggaagtaccgctttcagcgcgctgatgtagcccggaccaaacgccgacgacgggaaaatttttaacgcctgtgcgcctgcatccagcgcagaaaaggcttccgttgccgtggcgcagcccggacacacggtcatgccatagctcaccgcccggcggatcacctccggttggatattcggcgtgacgatcagcttgcagcccatcccggcaagctggtctacctgttccggtttcagtacggtaccagcgccaataagcgccctgccgccatacgccttcaccacggaagaaatgcttttttcccactgtggggagttaagcggaatttctatagcgtcaaatcccgcatccaccaccgcgccaacgtgcgccagggcatcatcgggcgtaataccgcgtaagatagcgatgagagggagattagtttgccactgcatgagcgatgctccttattccagcctgaaatgccatatcgccatccacggttgaaacatcacgcccaatagcactaaacgcctgttggtaacgtgagatcagcgcgggtccagcgacgagagtgatagcctgttgcgccgcgaaggattcgctcatgctggcgacttccgcgccaatcaacaggccggagaggaagtcgctgacctgctcacgcgcaagatgtcccaacacgtgcgaggcgcgaacctcaaaaagagaaggcaggacggcaggagaattaagaccgcgctccagccccgcggcataggcgtcgccagaaacttcctgttccggcaaaccagccccgaccagcgagtgacgcagcaacaagtgatggagttcgcctgtcatcacagtacgaaaatcatgaatttgttgcgtatcagtctgtacccatttgcaatgtgtgccgggcatgacatagacagaagaaggagaaagttcgcaggcgccaagcagttgcgtctcttcgccgcgcatcacgttgtggttatcctcgcgtgagacacacaatccggggatgatccagatgttgtcgccaacggcggttaactgttcgccaatagcggagaacagggcgggaaccggcagataaggcgcattttgccagcctacgttactgccgatcatgcccgccattaccacgggggtggcgctgtcgcgccagtgtgttgtgacttctgctaacaccgcgtcaggagatttaccgttcaggcgtgtaacgcctgcttctgattgcctgctctccaggcatttgtcgccctggtaaagccaggcgcgcagattggtcgatccccagtcaattgcgatgtagcgagctgtcatgtgatttcctttaaccttcgtgtcgagctggcgatcatggttaatgccgcctgctctgccgcatcgccatcctgatgccgtatcgcatcgaatagcgccttatgttcctggagcgttttcggcatgttggccgcatcgcccatccaggtccgttcaaataccgctcgctgtagcgagctgatcgctacatttaactgttgcagcaccgggttatgcaccgactgcaacactgcttcgtgatagcgaatatccgcctcgttaaacgcttcccggtcctggttattggcaatcatgtcgtttagcgccgactcaatttcagccagatcgcttgatgttgcccgttccgccgcccagcgtgctattgctggctccaccaggtttcgtatttcgctcatcgcgctgataagcctcgggtcgtagtcgttttccagcacccattgcagcacgtcggtatcgagataattccactggttacgcggtgcgataaacgcgccgcgataacgcttcatttcaattagccgcttcgccataagcgagcgaaacacttcgcgaatgatgttgcgcgacgtttcaaactcctcgcacagatccgcttccgctggcagcgccgaaccgggtacgtatttaccgctgacaatctgtttgcccagcgtgataacgatgcgatcggttttattgagagtcatagagagtccttgtgctcgatgtgaactctcttactttaccgcgatagctgaattacgccgcaattttgtagtactagcgtgatatcaaccgtcgttatcatgccattaatgtagtacaacacaattatgttgtactacaatttagatcacaaaaacgacaattggttatgggaacgttataagacgtaaacgaaagacataaaaaaacccgcagcaagtgcgggtcgttaagcgagtatttgcccgatggcgactatgccttatcgggcggggaaatggccggatgagtgatcggggttcagcacaaatttttcaatcgcccaggcaacaccatcttcaaggttcgatttagtcacaaagttagccacctctttgaccgacggaatggcgttgtccattgccacgcccataccggcgtattcgatcatcgcaatgtcgttttcctgatcgccaatcgccatcacctcctctggcttaatacccagcgcctcgaccagtgattttacgccagtgcctttattaacccgtttatcgaggatttcaaggaaatacggcgcacttttcagcacggtgtacttttccttcacctctgccggtatacgcgcaatcgcccggtcgagaacggcaggctcatcgatcatcataactttcaggaactgggtgttcgggtccatcttctccgcttcacaaaataccagcggaatggtcgccacatacgattcatgcaccgtgtagtagctgatatcgcggttagcggtataaagcgtatttcggtctaatgcgtggaagtgagaacccacctcacgggacagtttttccaggtaacggtagtcatcatagctgagcgccgtttgcgcaaccgtactgccgtcccctgctttctgcaccagcgccccgttataggtgatgcaataatcaccgggctgttccatgtgaagttctttcaggtaactgtgcacacccgcatacggacggcctgtggtcagcaccacgtttacccctttttcacgcgcagcggcaatcgcgtttttaaccgccggagaaatggtgtgatcgggcagcagaagggtgccatccatgtcgatagcaatgagtttaatagccatgaaatccccgcattaaatgagtcctgactcatgctaacgcgattccgctcaaaaaacagtaaagaatccgagagaaagggggataagattcacaaacgggattccccttttcaggccgtattctctcctcctgatgtattagataacctcattaatcaaacagaaaataccgtttttctaaaagaatgcgtattgctactttggacatcatcacttagagcctaatgggattggttcttaatcagtaaaaatcaacaaaaacttatattttaaaataaccttatccgatgagaaggagatcgctaatgtcgatggcccttaccgcccccccaaccaggaaaagatttttaatcgttgcctgtctgtttattggaatatttattgcttatctcgatcgcgttaatgtttcggtattagccgcgaatgaacccttcttagcctatatgggtattgaaggcatgcccttgcaaatcggcatgatgatgaccgtctttctggccgcttatggtatcgctaacgttgtattatcaccgcttggtgattatctcggccccagaaaagcgatgatgctttgtattctgatctggactatcgctttaatgattggcggagtcgctacatcattcgctctaattattatttgccgtatattactgggcatcggagagggattttattatccactgcaaagcgtatttattaaaaactggttcccgaagcaggaacgcggcagagcaaacgcggcgtggatcgtcggccagtcagtcgctcccgccattgcgatgccttttttcacctggtggataggcacccacggctggcgctccaacttctttttatgcgccgctcttgggttaatcccactctggctactttggcgatatgttgctgataaaccagaacaacataaaagtatcagcgagcaggaactggcttatatcaaagccgggcaggaaacggaaagcgcaggcagcagcgaaagttttatgttgcgggtcaaaccggtgattaccaactacagctattggctgctggtgctgtggtatctgtgtctgcaatgtttatattggggaatgattacctggctgccgacctatctaaaatcagccagagggttcagttgggcggaaatgggctggctggcgtcgcttccctttgtcctgtcgatatttgccaaagcggccgcaggcgtcttcgtcgataaaataggacgcagcgcccccatattaatggtattaatgtttttcgctggcgtcagtatctatttcggcaccataaccgaacataaatatatgtcggcggtactcctctcctttgctgttgctttctgtacgatgggtacgcccgttgcctggacgttattacagggaatgataccaggaaaatccatatccgccgccagcggcgtaatgaacggcgtcgccaacggactctcttcattatctcctgtatttatcggcttatttatttctatcactggaacttataccggcggcttactatgcctggtttttatcagcgctatcgccgtggtatcggcattaatcttaacgattaaaaaatattaattacgaggagtaaatgatgaaaattaccagcgttgatattattgatgtggcgaacgattttgcgtccgccaccagcaaatggcgtccggtggtggtaaaaattaataccgatgagggcatttccggttttggcgaagttgggctggcttacggcgtcggcgcttctgcgggcatcggaatggcgaaggacctgtcggccattatcatcggcatggacccgatgaataacgaagctatctgggaaaaaatgctcaaaaaaaccttctgggggcagggcggcggcggcatcttttccgctgcgatgagcggcatcgatatcgcgctgtgggatatcaaaggcaaagcgtggggcgtgccgctgtataaaatgcttggcggcaaaagtcgcgagaaaataagaacctacgccagtcagctacagtttggttggggggacggcagcgataaagatatgctgaccgagccggagcagtatgcacaggcggcgctgaccgccgtcagcgaaggctatgacgcaataaaagtggataccgtcgcaatggatcgccacggcaactggaaccagcaaaacctcaacgggcctctcaccgataaaatcctgcgtctgggctacgaccgtatggccgccattcgcgatgcagtcggcccggacgtggatatcatcgccgaaatgcatgcctttacggataccacctcggcgattcagtttggccgcatgatcgaagaactgggcatcttctactacgaagagccggtcatgccgttgaaccccgcgcagatgaagcaggttgccgataaggtcaatattccgctggcggctggcgaacgcatttactggcgctggggataccgtcctttcctggaaaacggcagcctgagcgtgatccagcccgatatttgtacctgcggcggcatcaccgaagtgaagaaaatctgcgatatggcgcatgtttatgacaaaacggtgcaaatccacgtttgcggcgggccgatttccacagcggtggcgctgcatatggaaaccgcaatccctaacttcgtcatccacgaactgcaccggtatgcgctgctggagccgaatacacagacctgtaaatacaactacctgccgaagaacggcatgtacgaagtcccggagcttcccggcatcggccaggaactgaccgaagaaaccatgaaaaaatcaccaaccatcaccgtaaaataagccaactgtctgcctgcgccgcaggcagacaccctgtatttgcgagtcgtatcaacgcgaccttatccagcctgagataaaatcctctcagtaaaggggtaacacaggtggcaaatgaatttaactatccggcaatttcgcgcgtttctggccgtcgcggatttgcgtagttttaccgccgccagcaaatatctgtgcatcacgcagggagctgttagcggtttaatcaacgaaatggaaagccagatggaggtttcccttttcgaccgcacttcgcgcgtggtgaagctatcgcccgacggcgaaaagtttttacccgccgccatgcgggttgttgaagagtttcaacgggccgaaaattatgcccgcgacctgaaagagatcaaaaaatccctggtgcgggttgttggcgcgccgctgatcgcctgtgcttttctgccgcaaatcatccatgcctttaagcggcagcatccgcatacccacgtacagcttattgataagcccatgtcgcaattacaaaaaagcattatgttgggagaagccgattttggtatcggcccggagcggccgctggaaccggaaatcgacaaacaaacgctgttcacaacggaaatcgccctgtactgccatccggactatcggctgcataaaaaaacggttcgctgggaagagattcaaagcgaagagctgatcgccgttggcaacgaatccattccgatgatctccgcaaccgctggcgtgcgcattaagcccaaaatgacggtggaacatatggcgaccgccatgtcgctggcggcgcagtgtgaaggcgtggtgatcgccggaaccttttcccgccattacgccaaaagctaccaattagcgacctgttcgctcacgcctccgctgcggcgcaatatgaacctttatttccatgcgtggcgcgcacaaacgcccgccactcagcgctttagagattttttattcagctatgtcgatgaacatcatgatgccccggccaaccagcggtaggccggggattaaggcaggttaaatatcgatattcgctgctttcagggcgttctcctcgataaaggcacgacgcggctcaacggcatcacccatcagcgtagtgaacagctggtcggcagcaattgcatctttgacggtcacgcgcagcatacggcggctttccgggtccatggtggtttcccacagctgatccgggttcatttcacccagacctttataacgctggatagctagaccgcgacgtgattctttcaccagccactccagcgcctgctcgaagctggttaccggctggcgacgctcgccgcgttcgataaacgcgtcctcttcaatcagaccacgcagcttctcgcccagcgtgcagatacgacgatattccgcgccggtcacaaactcgtgatccaacggataatcggtatccacgccatgcgtacgcacgcgaacgatcggctcgaacagattctgttccgtattagtatgaacatcgaacttccactgactgccgtgctgctctttctcgttcagctcggtaatcagcgcattcacccagcgcgttacagtctgctcatcagaaagatcggcttcggtcagagttggctgatacaccagctctttgagcagcgctttcgggaagcgacgctccatacgaccaatcattttctgcgtggcgttatattcagagaccagtttttctaacgcttcgccggatagcgccggcgcatgagcgttcgcgtgcagagtcgcaccgtcaagcgcgatggaaatctggtactgatccatcgcttcgtcgtctttaatgtactgttcctgcttacctttcttcactttgtacagcggcggctgcgcaatgtagacgtggccacgctcgacaatttccggcatctgacgatagaagaaggtcaacagcagcgtacggatgtgcgagccgtcgacgtccgcatcggtcatgatgatgatgctgtgatagcgcagcttgtccgggttgtactcgtcgcgaccgataccgcagcccagcgcggtgatcagcgtcgccacttcctgggaggaaagcatcttgtcgaagcgcgctttctcgacgttaaggattttacctttcagcggcagaatcgcctggttcttgcggttacgcccctgcttcgcagagccgcccgcggagtccccttccaccaggtacagttcggacagcgccgggtcgcgttcctgacagtccgccagtttgcccggcagaccggctaaatcgagcgcgcctttacgacgggtcatttcacgggcgcgacgcgccgcttcacgcgcacgcgcggcgtcgataattttgccgacgacgattttcgcgtcagatgggttttccagcaggtattcgctcagcagttcgttcatctgctgttctaccgccgatttcacctcggaagagaccagcttatctttggtctgtgaggagaatttcggatccggtacttttacggaaaccaccgcaatcagaccttcacgggcatcgtcgccggtggcgctgactttggcttttttgctgtagccttctttgtccatgtaggcgttcagcgtacgggtcatcgccgcacggaagcctgcaaggtgagtaccgccgtcgcgctgcggaatgttgttggtaaagcagtagatgttttcctggaaaccatcgttccactgcagcgctacttccacgccgataccgtctttttcggtggagaaatagaagatattcgggtggatcggcgttttattcttgttcagatattcaacaaacgccttgatgccgccttcgtagtggaaatgatcttctttgccatcgcgcttgtcgcgcaggcggatggagacgcctgagttcaggaatgacagttcacgcaggcgtttcgccaggatctcatattcaaattcagtgacgttggtgaaggtttcgtggctcggccagaaacgtaccatcgtgccggttttatcggtatcgccagtgacggccaggggtgcctgcggcacgccgtgctcgtagatctgacggtgaattttgccatctcgctggataaccagttccagtttttgcgacagagcgttgactaccgagacgcccacgccgtgcagaccgccggagactttataggagttatcgtcaaatttaccgcccgcgtgcagaacggtcatgatcacttccgccgccgagacgccttcttccgggtgaatcccggtcggaatgccacggccatcatccgttacggacacggagttatcggcgtgaatagtcacgacgatatctttacagtgacctgcgagcgcttcgtcgatagcgttatctaccacctcgaataccatgtggtgcagaccggtgccgtcatccgtgtcgccgatatacatacccgggcgcttacgcaccgcatccagccctttcaggactttgatactggaggagtcataagaattcgacatcaacgtttctcgctcatttaatcttgggttaatccgttattttacccttttccacggtaaacatcttcgaattttcatccgacatgtctataacgtgttcagcgctaattgcgctgacaaagacctgcgattgcgtggcttttaagcggctggccagcagtccgcgacgcgcatcgtcaagttcagaggcaaaatcatctatcaggtacaggcagcgccgcccgctttcgcgggtgaggaactcgccctgcgccagacgtaaggcgcacatcaataactttagctgcccgcgcgacagggtatcttccaccggcgcgccgtcggcgcgaatgcgaaagtccgctttatgcggcccgtgcgcggtgtaggtcaacatacggtcacgctcaaagcttcgctccagcacgtccgcatagtctgtctctttctcccagccgcgctggaaagagaacgtcagggaaaattcaggtaaaaactgctgacaggtatccgccatgtcctgtgcgatagcgctactgtactccgcccgccaggtactaatttgttccgccagcggaatcagctctttatcccacgggcgcaattgctcataacgactcacctggcgcagcgcggcattacgctgtttcagcaatcgtttcaggttgctccaggcggtgaagaatccggcttcgttgtgaaagcatccccagtcaaggaacgctcttctgtatttggggccgccgttgagtaaagtaaacccctccggcgtaatcaactgcatcggcattaaatgcgccagctccgcgatcttgtgaccgtcggtaccgtcgatacggaccttgctgtcgccctgcttatctttggttaagccaatcgacgtctcacgctcttcgctctgtaatcgcccgtgaagaacaaacgcttcctgctcatgacgaatcacgcggccaggctgcaaactgcgaaacgcccgaccatggccaagcgtatagatagcttccagcacgctggttttgccgctgccgttggcgccaaccaggaagttaaagccgggggataaagcgagatccgcattttctatgttgcggaagtctttgattaaaaggcgcgtcagtgacatatattagtacattcgtccaggggcgtgtgtgtcgcagccagttcgtctaccgccagcgcgcagaaagcggagcgtacacgaagtacgtgagcatttcgagcactgccgggaggcgaaatggcaagtaaaccagccccttttcagattctacagcctcattggcataacaacgtaggcagcactctgtgacgccgcatcctcaatctgtacgctggatacggaatccgtcagcataatgcgcacggtttcgcacttcagcgcattgagcacgtccagcacgtaactgacgttaaagccgatttccatctccgtcccgccgtagctcacgtccagaatctcttccgcttcttcctgttccgggttattggcggtgattttgagctgattctcactgacgtacagacgcacgccgcggaatttctcattcgagaggattgctgcgcgggcaaacgcctgcttgaggatatcgcagcccgcttccagatgtttatccggattcttcggcagaacgcgacggtaatccgggaagcgaccatccaccagcttcgaggtaaagataaagtcgccgacgtgcgcgcggatattattactgccaatctgcacgcgcagcgggttttcgccgccgtcgagcatacgcatcagttcaatcacgcctttacgcggcacaatcaccgagtggctgggtaaagacgcttccagcggcattgagcacaccgccagacggtggccgtcggtcgcgacagtgcgcagttcgctaccttccgtttcaaacagcataccgtttaagtagtagcgcacatcctgatgggccatcgaaaactgggtcgattcaatcaggcgcttcatcgtggcctgcggcagcgtaaattcaacttcgctttgccagtcgtcaagattcgggaaatcggcggcaggcagcgtagacagcgagaagcggctacggccagaacgcaccagcatccgatcgccttccaactgaacggcaatctccgcgccctccggcaggccgcggcagatatcaaagaatttccgcgccggcacggtagtggcgcctggctcatgcggctgagaaagcgtaacgcgcgcgaccatctccatttcaagatcggtgccggtcagagaaagcgtaccgtccgctacctggaggagcaggttaccgagaatcggcagcgtaggacggccgcccagcgggccgctgacctgctgaagcggttttaataaatgttcacgttcaacggtaaatttcataggatcacgacgacaatgttctgattaaattcgaaaaatcttctttgatatcgtggctttcttcacgcagttgctcaattttacgacaggcatgaagtacggtagtgtggtcgcgcccgccaaacgcatcgccgatttccggcagactgtggttggtgagctcttttgccagcgccatagccatctggcgcggacgtgctaccgagcgagatcgacgcttagaaagcagatccgcaattttgattttgtaatactcggccaccgtcttctgaatattgtcgatggtgaccagtttttcctgcaacgccagtaaatcgcgcagcgcttcgcgcacaaagtcgatagtaatcgcccggccggtaaagttggcattggcaatcacccggttcaacgcgccttccagttcacgcacgttagagcgtagacgtttggcgataaagaacgctacttcgcctggcagacgaatatcattttcgtccgcttttttcatcaggatcgccacgcgggtttccagttctggcggttcgatcgccactgtcagcccccaaccaaagcgggacttgagacgatcctcaacgccgttgatctctttcggatagcgatccgacgtcaaaatgatctgctgattgccttccagcagagcgttaaaggtatggaaaaactcttcctgggatcgttctttattggcgaagaattgaatatcgtcgatcagcaatgcgtcaacggagcggtagtagcgtttaaactcttcgatggcgttattttgcagggcttttaccatgtcctgcacaaagcgctcggagtgcatatacacgactttcgcgttgggtttacgcgccataatgccgttacccaccgcgtgcagcaggtgagttttacccagaccggtgccgccatagaggaataacgggttataagcgccgccaggattatccgccacctgacgtgccgccgcgcgcgccagttggttggatttaccttcgacgaagttatcaaatgtatgttttacattgacgttggagcggtaggtcggctccgctggcgctggtacgttatcccagcccgaacgggccgcaggcgctacgcgctgcggctgcgccgttgttgtctgcgcaggcgcgacaacgttatgcacaggcgtttttagcgtttgcgtaacgggctttgttcccacttcaaaacgcagttgtggggcatccgcgccgcagaatgtgttgagtaatccattgatattgttgaggtacttatctcttacccaatcgagcacaaaacggtttggcgcatacaaagccagcgtgttatcgctcagttccgcctgcaacgggcgtatccacatactgaattctgtggctggtaactcatcctgcaatcgggcaagacactgctgccaaagcgaaagtgacacggcggactccactcgaacaaaagtcgataaatgacaaaggctgatacattaatgattgttggcgcacgtcgataagaccctgcatgaagggtgacgcacgaaccgctgtctgcggttttcacggatctttcaaacgatcgcgacttcacgcagtctgaaaaatttcgtgttcatgcctgaccaggatcgtttgaaacgatcaggaccgcggatcatagcctaaactgagcaagagatcttctgtttctcacagattcttccctatttatccacaggactttccaggaaaggataagtgtaatcgatcctggggaactcctgtacgctttcgcgcgcatattgaaaaaattaataggtaaaggtgagcagacgcctaaaagatcgcataaagatccagggcgatccttgcgctttacctggcagtccgtataattctccacccgtcgcgcaatgcccgtcatatggcgtcaacgctgcttattttccgcacaaaaaggcgtggaaaatcgcgggaaaataaggaaagagaattgactccggagtgtacaattattacaatccggcctctttaatcacccacactgtggcgtaagtcgttcaaagtttgttcgggtatacgcaaaagtcagtgaatttattcaagtttaggtagaaatcgccatgaaacgcacttttcaaccgtctgtactgaagcgcaaccgttctcacggcttccgtgctcgtatggctactaaaaatggtcgtcaggttctggcacgtcgtcgtgctaaaggccgcgctcgtctgaccgtttccaagtaataaagctaacccctgagtggttaagctcgcatttcccagggagttacgtttgttaactcccgctcatttcacattcgtcttccagcaacctcaacgggctggcacgccgcaaatcaccatcctcggccgcctgaattcgctggggcatccccgtatcggtcttaccgtcgccaagaaaaacgttcgacgtgcgcatgaacgcaaccggattaaacgtctgacgcgtgaaagcttccgtctgcgccagcatgaacttcctgcaatggatttcgtggtggtggcgaaaaaaggggttgccgacctcgataaccgtgctctctcggaagcgttggaaaaattatggcgccgccactgtcgcctggctcgcgggtcctgatagcccttattcgggtctatcaacgcctgatcagtccgctgcttgggccgcattgtcgtttcacgccaacgtgctcaagctacggaattgaggcattgcgcaggtttggagtgataaaaggcagttggttgacggtgaaacgcgtattaaaatgccaccctttacaccctggtggtgacgatcccgtcccgcccggaccatttgataccagagaacactaacgatggattcgcaacgcaatcttttagtcatcgctttgctgttcgtgtctttcatgatctggcaagcctgggagcaggataaaaatccgcaacctcagactcaacagaccacgcagacaacgaccaccgcagcgggtagcgccgccgaccagggcgtaccagccagtggccaggggaaaatgattacggtgaaaaccgatgtgcttgatttgactatcaacacccgtggtggtgatgtcgagcaggccttgctcccggcttacccgaaagaactgggttccaacgaaccgttccagctgctggaaaccaccccgcagtttatctatcaggcgcaaagcggcctgacaggccgcgacggcccggataacccggcgaacggcccgcgtccgctgtacaacgtcgagaaagaggcgtttgtactggccgacggtcagaacgaactgcaggttccgatgacttatactgacgccgcaggcaacacgtttaccaaaacgtttgtctttaagcgtggcgattatgcggttaacgtgaactatagcgtgcagaacgccggcgaaaaaccgctggaagtctccacctttggtcagttaaaacaatccgtcaacctgcctcctcatcgcgacaccggcagcagcaactttgcgctgcatacattccgcggcgcagcgtactccacgccggatgagaagtatgagaaatacaaattcgacactattgccgataacgaaaacctcaacgtcagctccaaaggcggttgggtggcaatgttgcagcagtatttcgctaccgcatggattccgcgtaacgacggcaccaacaatttctacaccgccaatctgggcaacggcattgtcgctatcggctataaagcgcagccggtactggtacagccaggccagactggcgcgatgaccagcaccctgtgggtcggcccggaaattcaggataaaatggcggctgttgcaccgcacctggatttgaccgtggactacggctggttgtggttcatctctcagccgctgttcaagttgctgaagtggatccacagctttgtgggcaactggggcttctccattatcatcattacctttatcgttcgcggtatcatgtacccgctgaccaaagcgcagtacacgtcaatggcgaagatgcgtatgctgcagccgaaaattcaggcgatgcgcgaacgtcttggcgatgataaacagcgccaaagccaggagatgatggccctgtacaaagcggagaaggttaacccgctgggcggctgcttcccgctgatcatccagatgcctatcttcctggcgttgtactacatgctgatgggttccattgaactgcgtcatgcgccgttcgctctgtggattcatgacctgtccgcacaggacccgtactacattctgccgatcctgatgggcgtaacgatgttcttcattcagaagatgtcgccgaccaccgtgaccgacccgatgcagcagaagatcatgacctttatgccggtcatctttacggtgttcttcctgtggttcccgtcaggtctggtgctgtactatatcgtcagcaacctggtcaccatcattcagcagcagctgatttaccgtggtctggagaagcgtggcctgcatagccgcgagaagaaaaaatcctgattcggtgtaggccggataaggcgaagccgccatccggcaaggcgcgccggtcagcctgatggcgctaacgcttatcaggcctacaatcaaaaggcggtcatatgaccgcctttttttattgcaacaaagttgagactaaccatgagccataacgacactatcgtcgcccaggcaaccccaccgggacgcggtggcgtgggtatcctgcgtatttccggtctgaaggcgcgcgacgttgcgcaagaggtgctgggcaagctgccgaagccgcgctatgccgactacctgccgtttaaagatgttgacggcagcgcgctggatcagggtattgcgctgtggttccccggcccgaactccttcaccggtgaagatgtgctggagctacaagggcacggcggtccggtgattctggacctgctgttaaaacgtatcctgacgcttccaggcgtgcgcattgcccgaccgggcgagttctccgagcgagcgttcctcaacgataagctcgatttagcccaggcggaagccattgccgacctgatcgatgccagttccgaacaggcggcgcgttcggcgctaaactcgttacagggggcattttccgcccgcgttaaccaccttgtggaagcacttactcacctgcgaatctacgtcgaagcggctattgattttccggatgaggagatcgactttctctctgacggcaaaatcgaagcgcagctcaatggcgtcatcgccgatcttgacgccgtgcgcaccgaagcgcgccagggcagcctgctgcgcgaagggatgaaggtagtgattgccggacgcccgaatgccgggaaatccagcctgctgaatgcgctggcaggccgtgaagcggccattgtcaccgatatcgccggtaccacgcgcgacgtgttgcgcgagcatatccacatcgacgggatgccgctgcatatcatcgataccgccggactgcgcgacgccagcgacgaagttgagcgtatcggcatcgaacgcgcctggcaggagattgaacaggccgatcgcgtgctgtttatggtggatggcaccacgacggacgccgttgaccctgccgacatctggccggactttatcgcccgtctgcccaaaaatctaccgattaccgtggtacgtaacaaggcggatatcaccggcgaaacgttgggtattagtgaagtaaacggtcactcactggttcgcctctcggcgcgtaccggcgaaggcatcgacgtgttgcgtaaccacctcaagcaaagcatggggtttgataccaatatggaaggcggcttcctggcccgtcgccgtcacctacaggcgctggcggaagccgctgaacaccttgagcagggcaaagcgcagctattaggcgcatgggcgggggaactgctggcggaagagttgcgcctggcgcagcaaagcttaagcgagattaccggcgagtttacctccgacgacctgctgggacggattttctccagcttctgtatcggtaagtaagttttagtccaccctcgtcagtgaacgttcactaacccgcattaactgcctgttaacgcgggtttttactttccatactcgtccatagtcgtgcgggttcatccgcgatttttgtgtcctgaattgtccccatctttaaatccctcgtgtaccattgtttactttttgatctaaaaattacatcaaatgaacacaaaaaacggtataaaaaacgctcaaatatcccttctcatggacacactatagaggtgagatatggcactttcagataccaaattacgcacacttgctcccagaaaccgcccctggcaacttgccgatcatgacgggttggtgattgaagttcttcccaccggacgaaaaatctggcgtttccgctaccgctttgacaacaaatcgcaacagatcacgctgggcgaatacccagctttctcacttgcagaagcgaggctctggcgtgaaaagtgccgctcactggttgcccatggcatcaatcccgcgcagaaaaagcaggaagaaaagcttaaacagaaagacccaacgacagtcaaaacattcgccaaacgctggctgaccgatatcgttgaaaaaagtaaccgcgatccacgcaacatcactcgcgttatcgagaaggacatcattcccatcatcgggaagctggaactcgaagaactcacaactgcccacattcaggtcgtgctcgaccgcatcaagcaacgaggttcggatcacgtcgcattactgacgtgaaacgtgcttaaacgcatgctggcctatgcaatttccaggggaatcatcttcaacaacccggcagcggctatcgaggctcgttatatcacacaagcaacaagtcgtgatgtggcactgaccgcagaagagatcggcatcctgttacgggggatctacacctctaacatgaaccgacgccacaagctggccctgcacctgctgatcatctgcatggtgcgtaaatcggaattgattgaagcaacatggagtgaagttaacttcaacgcgctggaatggcgtatccccggcgaaagaatgaagatggataatccacatattgttccgctgtcaaagcaggcgctggcgatgttcgaagagctaaaatttctggccggagattccccttacgtcttccccagccgacacggctaccgacgtccgatctccaaaacaacgctgaactgtgcggtgcgtacgcaggatctgaacgtcagggattttgttattcatgacttccggcgtactgccagcacattgctacatgagcagggctacaactcggattggatagagaaatacctggcgcataagatcggcggcgttcacggtgtctacaaccgtgcggagtacctgaatcagcgccgggagatgcttcagtcttgggctgattttgttgatgcgcagattgagactggaaggaaggttatcattggacaattcgggaagtcttacaatgtaaccgtatgaataatatggaaaatataacaataatagtttctgattagaatatactatctaaccggttgaaaaagatgcacttctcaaccataataacatcactctttagcgttaggctttgatttatagccttgtcgagcgtttcgccagacactaacttattgagtacttttagggttgcgctagaaagttttctaccgatcctagaagtctctaggatcggtagaaaactttctagcgcctcctctagtaaagagtaaaaaacgagcaaaaaacattgctcgtttttttcatcaacggaagacaaatcaaaaatacataacgtttaaatcaatgtttgaagaaactattaaaaaacaatttgaattgttagacataagtaacttcaatgttgatatatctcatcgtctccttttcgtgtgtggtggcaaagtcgatgtacgtgcaccaattccccccagttttagggatagactactcacttacacagcaaaaaatgcctctgaacttcacgaacatttcattctagctgagacattcaaggattattttaaagagaatgcctatccggaccttctggtgtttgaagatgatatagccagtatttcatctcttattatcatttttttagaaagcccaggatcattagttgagttaggtatattttgcaacaaatcagaactatttaaaaaaatactgattgttgcttcagcggaagaagtatacggtgaggactcattcatttatttaggcccactagagtatattaagaagaaagtctcatcctctgttgtaatctatccttggccggatcctgaagtcttaaaatacgataatgattttcttgatgatttatgtgtaaatataaaagaaaaactttcatcaatcccaaaaacagaacaattcagtaaggataattctggacatatagcacttctaattactgaaattatatctctttgcgccccaatacaacttagtgaaatagaatcagccctaaactcattagggattaatatttcaacaaaaattattaacagatcaatttatttacttcagaaagttggttttatagacgttttatcatatagctcaaacaaatattactttccattaaaagagcgcaaatgggtaaaatttggtaaaactaaagataataaactcatagataatcaacaattaaaaatgaaggttagacaatcttttgtaacattaaccgatccattatcaaaacgaagaattacagcgctgcgtcaaataatagcaaaaaaagaaatggctgaggagattaattaatggacatattacagcatatttcagatttactattaaccaagaaaagtgaaatcatttccttttcattgacggcaccttatcgctataaaatatataaaattgcaaaaagaaactcagataagaagagaactattgctcatccttcgaaagaactaaaatttatacaacgtgaaattactgagtatttaaccgataaattacccgttcatgaatgcgcatttgcatataaaaagggcagtagcattaagaccaacgctcaagttcatcttcatacaaaatacttgttgaagatggattttgagaattttttccctagcataacaccacgtctatttttctcaaagttacgacttgcaaatattgatttaactgcagatgataaagtactacttgagaatatattattcttcaaatccaagagaaatagtaatttaagattaagtattggagcaccaagctcacctttaatatcaaattttgtgatgtacttttgggatattgaggttcaagagatatgctctaaaataggcgttaactatactcgttatgctgatgatttaaccttttcaacaaataataaagatgttttgtttgatatacctgacatgcttgaaaacgtactgcctaaatattctttaggtaggattagaatcaatcatgaaaaaacagtgttttcttcaaaaggacataaccgtcacgttactggtataactctaacaaacgataacaaattatccataggtagagaaaggaaaagaaaaatctctgccatgatccatcattttataaatgggaaattatctactgacgaatgcaataaattagtcgggctacttgcatttgctaaaaatattgagccttcgttttataaaagcatggtcattaaatatggatctgataatatttataaattacaaaaacaaaaagacaaataatttctgctgcacttttatagacaccagtgttttgttgattatgcccagaacaacttggaataagttttcctaagcgtattacattatacgcttggcctaacttaatcatagattttccagaaaaataaatttttcaaatcccataaacaattccccacagcttccctacgcccccggtcaaccagggaacgaagcgtggcctgaaactgacctcctgtctcgatacaggtgaccacaccctttatcgctaccctgttgcaagcgtagcggcagacagaacgctgtagataagtcggacggcattgccgaaggctttccgtccgtacttcctgctgaatgtgcaaaacgcggcgtcacttttaagagcgtaagagagtgaaagtgacgccagcgcgcagatcagcttcaacccggctactgcctgcaaatccactgcaacaaactggctgacactcaaacagatgtcagaaattcacttaccagggtcaatctggccgggatctcaaaaaatgcatggaactaaaacgggtctatttacagtttcaccagctacttggtttttgtgtcctttaatgtgcccatagccatgttttcaaggcaaattatagattatatatcaacgaattatctagattttccagtttctgtattggtgtcgggtgacggctgacgccatccggcttacgtcactgccggggtgatatctcattgcctcataggaaatcactgttgtccaaatggcaactcgtctcgcgcaacatcgccccgtattcttagcgccacacttttcgtgaggccgctatgaaacgttttctactgtgtagttttgccctggttttactctatcctgccggtattgatatgtatctggtcggtttaccgcgtatagccgccgatctgaacgccagcgaggcgcagttgcatatcgccttctccgtttacctggccggaatggcgacggccatgctgtttgccgggaagatagccgaccagtcaggccgcaagccggtcgcgatcgtcggcgcgctcgtctttatgatggcctcactgctttgttcacgggcgtcggaaggctcgctatttctgagtgggcgttttcttcagggagtaggcgcaggcggctgctatgtggtggcgttcgccattctgcgcgacacgctcgacgagcatcgccgggcgaaagtgctgtcattattgaatgggattacctgtattgtgccggtactcgccccggtggtggggcatttgattatgcttcgtttcccctggcaaagtctgttctatacgatgtccgcgatgggcattattgtgggcctgttatcactgtttatcctgcgcgagacgcgcccggtaaggctggctccacgcgatttatcacgatcgtcgcccgccgccgagtcgctgattaaccgttttttcgttagtcgactggcgatcaccacccttagcgtgtcggtgatcctgacctttgtcaatgcctctccagtgctgctgatggaggtgatgggatttagccgtggcgactatgccattaccatggcgctcaccgcaggcgtcagtatggtcgtctctttttccaccccttttgcgcttgggttatttaagccgcgaaccttaatgctcgtctcacaggggctgtttttgacggctggcgtgacgttaagccttgctcataccaataccgtcacactctttggcctgacgcttatctgcgccggattctcggttggttttggcgtcgcgatgagccaggcgctggggccgttttcgctgcgcgccggagtggccagttccacgctcggtatcgcgcaggtttgcggttcatcactgtggatttggctggcggcaatactcggtatcagcgcgatgaatatgctgatcgggattctgattggttgtagcatagtgagtattctgctgatcttctccgtcacgcccaacaggtccgtagccgagcatgaagaaatcccttaccaatctcgaccttaatttgctgttatgcctacagttactcatgcaggagcgcagcgtcactaaagctgcaaaacggatgaacgtaacgccctcagcggtcagcaaatcgctggcgaaactccgggcatggtttgacgatccgctgttcgtcaatacgccgctgggcctggcgccgacgccgctgatggtcagtatggagcaaagtctggcggactggatgcagatggggaatcaactgcttgataaaccgcatcatcaaacgccgcgcggtttaaaatttgagttggcagcagagtcgccgctgatgatgattatgtttaattcactgtcgcagcagatttatcagcgctatccgcaggctaccattaaggttcgcaactgggattatgactcgctggaggcgattacgcgtggggaagtcgatatcggatttaccggacgcgaaagccatccccgctcgcgagaattgctcagtctgttaccgctcgcgattgattttgaggtactgtttagcgatttaccgtgggtctggctgcgggaagatcatccggcgctgcgcgaagcgtgggatctggacacttttctgcgctacccacatatcagtatttgctgggagcaaagcgatacctgggcgctggacgatgtcctgcaagaaatgggacgcaaacgccatatcgcgttgagcctgccggggttcgagcagtcgctctttatggccgcccagccgggtcacaccctgatagcaaccgcgccgcgctattgccagcactacaatcagctccaccagctaccgttagtggcgcgccccctgccttttgatgcgcaacagcgggaaaagctgatggtgccgtttaccctattatggcacaaacgtaatagtcataatcccaagattgtgtggctacgacaggctatcaacacgctctgccgtcgccttatctgaccacctgcgttgataaattaaccttcctcttaccagaaatgtcaccatctgattaaagaaccttctgaaattgaatttttagcgcgtaaaacctgtccataatttacgttaatgttactctcgtcattatcacggcccattaatcacggagcgaaaaatggcgactcactttgccagagggatacttacggagggacagttggtttcaattcgtctctcttcgtcttgccatattgaagccagaaacctgcctgctcaccgacgaacgcgttttctcgcctccagaggccttcttgccgaactgatgtttatgctgtacggaattagcgagctgccggaaatcattattcaggcgaaaggtaaacccgcgtttcgtgacaaaaatctgccaggcttttctatctcctatgccggaaatatggttggcgtggcgttgaccaccgaaggagagtgcgggctggatatggaattacagcgcacctcccgcggctttcaccatccgcattcgctcgaacgccaccctttctcccgtaatgaaaacttatgggtagccaatcaaaacgatcccaacgaagcgcgagcgcaactcatcacattgcgccagagcgtgttaaaactcaccggcgatgtcatgaatgacgatccgcgggagctgcaacttttacccgttgccggacgcctgaagtgcgcgcatgtcacgcagcttgaagccgtgtgcgatgcggaagatgtgctggtatggtccgtaaccgttacgccagcgatagaaaaattaaaagtgtgggagttcgatggcaaactgggctggaaaagcctgcccgatatccagacgcgcgccaatgagccaaccggtcgtctgatgcgattcgcccaactccccgccgccaaatcgtatacgcttaatcgttcataatgaaaaaaggggcacgtatgtctgaaacgctgaatgtggttacactgctgggaagtttacgcaaaggttcctttaacgggatggtggcgcgtacgctgcctaaagtcgcgccggcaggaatgacggtatcgccgctgccttcgatcggggatattccgctgtatgacgccgatatccagcaggaagagggatttccagccagcgtagaggcgctggcggagcagattcgcaacgccgacggcgtcgtcattgtgacgccggaatataactattccgttcccggcggcctgaagaatgccatcgactggctatcccgtctgcctgagcagccgctggcgggtaagcccgttcttatccagaccagttcaatgggggcgattggcggcgcgcgctgccagtatcatctgcgccagattctggtgttccttgatgcgatggtgatgaacaaaccggagtttatgggcggcgtgattcagaataaagtcgacccgcagactggagaagtggtggatcagggaacgttagatcatttgaccggtcagttgaccgcatttggcgagtttattcagcgcgttaaagcgtaagttcgttaaaaaccctccccccgatggggcgagggttcatttcatcagtgtgcgtcaataaacacaatcttcagcacaaataacagcgcgacaatcactacgcacgggctaaggtcgcgcaggcgaccggtaccgattttcatcacgcagtaagagataaagcccagcgcgataccttcggtgatcgagaagctaaacggcatcattaccgccgtaataaacgccgggaccgattcggttaaatcctgccagtttacccgcgccaggctggaggtcatcagcacgccgacgtaaatcagcgcgcccgccgccgcgtaaggcggcaccatgcccgccagcggcgacaggaagataaccagcaggaacaaaataccgaccaccaccgccgtcaaaccggtgcgaccgcccaccgaaacgccggaagaggactcaatataagcggtcacagaagacgttccgacaaatgcgccagtgacagaagagatactatcaacaaacagcgcctgcttcatgcgcgggaatttgcctttctcatccgccaggccggctttatcggtcacgccaatcagcgtaccggaggagtcaaacaggtttaccagcatgaaggagaaaataacccccgccaggccaagattgaacgagcctgccaaatcgacatgccctaccacgctggtgacgcttggtggcgcggagacaataccgttgtagtgtacatcacccatcatccagccaagcagcgtcgtgacgatgatggacaccagcaccgccgcatgaatgttgcgcgaagcgagaatcgcaataataaagaatccgagaacccccagcagcacgctgtgcgaggtcaggttgccgatgctgaccagcgtttccgggttagcgacgatcacgccggcgtttttcagccccatcatgccgataaacaggccgatgccgctggtgatgcccacgcgcaggctgaccggaatgttggcgatcatccagtaacgcacgcggaagatagtcagcaataaaagaccaacagcgccccagaaaatggcgcccatgcctacctgccacggcagtcccattgcctgcacaaccacgaaggcaaagaacgcattcagccccatcgcgggcgccagcgccaccggcaagttagcgaacaggcccatcagaatactgccaaaggccgcaatcagacaggtggtcacaaagacggcgctggtgtccatgccagctacgcccagaatttgcgggttaacaaaaacgatataaaccatcgtcaggaaagtggtaaaaccggcgatcacttcggttcgtgccgtcgtgccatgttcgcgcagtttaaacacgcgttccagcataccctgaccagaagcctgggtggtgtgttgttgactcattatcaatttccggagaaaggagggaaaattcgccgttatcctataccaaaatgcgacacctggcgcagttgtgtggtaatttttttcactcaatttgttagtacggcaacgattgcgtcccctcattcagcattacgtaaacgttaaacttgttaaaatggaaatgacatgtcccaaatcgaagcagtgttttttgactgtgacggcacgctggtcgacagtgaagtgatttgctcgcgcgcctatgtcactatgttccggcagttcggcattacgcttgagctcacggaagtattcagacgctttaaaggcgtaaagctctacgaaattatcgataccatcagtaaagagcatggcgttgcgctggcaaaggcggagctggaacccgtgtaccgcgcggaagtggcgcgcctgttcgataccgaactggaagcgatcgcgggcgcaaataccctgctggagagcattaagacgcccatgtgcgtggtatccaacgggccggtcagtaagatgcagcattcgctgggtaaactgggcatgttgcatcattttcccgatttgctgtttagcggttacgatattcaacgctggaagcccgatccggcgctgatgctccatgcggcgaacgccatgaaggtcaatgttgagaagtgtattctggtggatgattccagcgcaggcgcgcagtcaggaattgcggcgggaatggaagtattttatttctgcgccgatccgcataacaaaccgatcgatcaccctaacgtgacgacgtttaccgatttggcgcagttgccgggattgtggaaagcgcgcgggtgggagattacgcgttaactgaaatgcccggtggcgctaacgcttatccggcctacagcatctgtacctgtaggcccggtaagcgcagcgccaccgggcaaaagaatgagatttactctttcggatctttccccgccagcagcttatccagctcatcgccgccgacgtgacggaaatcctgccccttcacgaagtagaagatgtattcgcagatattctggcaacggtcaccgatacgctcgatagagcgcgcgcagaataacgcggtcagcacgctgggaatggtgcgcgagtcttccatcatgtaggtcatcagctgacgcacgataccttcgtactcctggtcaactttcttgtcttcacggtagatacgcaccgcttcgtcgagatccatgcgcgcgaacgcatccagcacgtcgtgtagcatctgcacggtgtggcggcccagtgactccagactcaccagcagcggctgatgctgctgggagaatttctccagcgcggtacggcagattttatccgccacgtcgccaatgcgctccagttcggcgatggttttgataatcgccatcaccagacgcagatcgctcgccgtcggctggcgcttggcgataatacgcacgcaggcttcatcgatggcgacttccatcatattaacctgatgatcgccttctaccacgcgcttcgccagctcgctgtcctggttgtgcatggcggtgatagcgtcagaaagctgctgctccaccatgccgcccatggtcattacctgagtgcggatgctttccagttcggcgttgaactggccggaaatatgtttattaaggttcagactgtccattacgcactcctgaattaaccgtaacgaccggtgatatagtcttctgtttgtttcttcgcgggcttggtgaacagatcgtccgtgttgctgaactcaatcaactcgcccaggtacataaacgccgtatgatcggagcaacgtgccgcctgctgcatgttgtgggtcacgatcaccacggtgtaatcctgtttcagctcggtgatcagctcttcaatacgcccggtagagatcgggtccagagctgaacatggctcatccagcagcagcacttccgggcgaatggcgataccgcgcgcaatgcacagacgctgctgctgaccaccggagagagagtacccgctctggtgcaatttatctttggtttcgttccataatgcggctttggtcaacgcccactgcacgcgctcgtccatatcggcgcgagacagcttctcaaacagacgcacgccaaaggcgatattgtcatagatggacatcgggaacggcgtcggcttctggaataccatccccacttttgcgcgcagcagcgcgatatcctgggtgttggtgagaatattgtcgccatccagcagaatttcaccttccgcgcgctgctccggataaagcgaatacattttattgaaggtacgcagtagcgttgatttaccgcagccggatggcccgataaatgccgttacctgattcttcgcgatatccagattaatgttcttcagggcatggaatttgccgtagtagaagttcaaatcacgaacctgaatcttactcggggcagtttcaaccatactcatttcactcttttcctcatccagcgccgcatccgccacgccgtaaaataatgcctgatggcgctacgcttatcaggcctacaatgtctttaaccgtgttttttcttcgcgaaaacaacacgcgccagaatattcagcagcagtacgcacagggtaataatcagcacgcccgcccaggctaattgttgccattcggcaaacgggctcatcgcgaatttaaaaatggtcaccggcaggttggcgatcggctgcatcatgtcggtgctccagaactggttggagagcgcggtaaacaacaatggcgccgtttcgccggcaatacgcgcaatagccagcaggataccggtcataatgccggagatagaggctttcagcgtaatcgcggaaatcatcttccacttcggcgtacccagcgcataagcggcttcacgcaggctatccggcaccaatttgagcatgttttcagtggtacggataacgatcggtacctgcaacagcgccagcgcaatcacccctgcccagccggagaagtgctgcatctgcgccaccacgatggtgtaaacaaacagccccacaacaattgacggcgcggaaagcagaatgtcgttaataaagcgaatgatttccgccagccaggatttacggccatattccgccagatagatcccggccataatccccagcggcgtacccaatacggtagcccagagaatcaataatccactccccgccagggcgttcgccagcccgccgcccgccgtgttcggcggcggcgtcatttcggtaaacagcgccagcgacatcccgtcgataccacgcgtgatggtggacatcaaaatccagatcagccagaacaggccaaatgccatcgtcgccattgagagcgttagtgcgatacggttcttcatgcggcgacgcgcctgcatcttgcgacgggattccgcgagctgcgcggtgttctgcatatcaagcgtagccattaacgtgctccctcgttcttcgccagacgcataatcatgaacttagacgccgccaggacgataaaggtgatcacaaacaggatcagccccagctccatcaacgctgccacgtgcaggcccgattccgcctcagcgaattcgttcgccagcgcggaagtgatgctgttgcccggcatatacagcgacgcgctgtcgagctggtaagtgttgccgatgataaaagtgaccgccatcgtttcacccagagcacggcccagccccagcataatgccgccgatcacgccatttttggtgaacggtagcacgatgcgccagataacttcccaggtagtacagccgataccgtaagcggactctttcatcattaccggtgtttgctcgaagacgtcgcgcataaccgccgcaatgtaggggatgatcatgatggcgaggatgacgcccgccgccagaatgccgataccaaaggccgggccggagaacagcgcgccgacaaacggaatgttggaaagaatattgccgaccggctcctggaagtacgtcgcaaacagcggcgcgaagataaacagcccccacatgccgtacacgatactgggaattgccgccagcagttcaatggcgatgccgagcggacgctttagccagcctggcgccagctcggttaaaaacagggcaatgccgaaactgaccggaacggcgatcagcagtgcgataaaggaggtcaccagcgtgccataaatgggcaccagagcgccgtagatatcgtttggcgcgtcccattccttagtccaaagaaatgagaaaccaaatttctgaatacttggccaggaggagatgatcaatgagacgataataccgcccaacatcaatagcacaatcagcgcagccagttttaccagcgcgctgaaaatcatgtcgccttttttacccggcgggttaaaagcaggcttggttgcagccataaattactctttccattaaacgcattttacgacgttgcccctgccggatggcgctacgcttatccggcctacaacgtgggcctgcggtcgaaaccgtagggcggataagcgtagcgccatccgccaattcgttaattaatacagcgccttaccgttgctgtcttttatactggtcttccatgcagcacgaacctgctcaacaacgttatccggcaggctggcgtagtccagatcattcgcctgcttagcgccatttttgtaggcccagtcgaagaacttcaacacttcagcaccctgctcaggtttcttctgcgctttgtggaccaggataaacgtggtggaagtgattggccacacatcgtcacctttctggttggtcagatcctgcgcgaaggttttgctccagtctgcgcctttcgccgcattagagaagctctcttccgtcgggcttaccggtttgccgtcggcagaaaccaatttggtgtaggccaggttgttctgcttggcgtaagcgtattcaacgtagccgatagcgcctggcagacgctgtacaaatgccgcgatgccgtcgttacctttaccgcccagaccggttggccagttcacggtagaacccgcgcccactttcgatttccactcgtcgttgactttcgccaggtaactggtgaacacgaaggaggtaccggaaccgtcagcgcgacgcaccacagcgatgttctgagaaggcagcttcacgcctgggttcagtttggtgatggcttcatcatcccacttcttgattttaccgaggtagatgtcacccagcgttttaccatccagcaccagttcgccggatttgaggcctggaatattcaccgccagcaccacgccgccgatcaccgtcgggaactggaacaggccttcctgattcagtttttcgtcagacagcggcgcatcggaagcgccaaaatcaacggtattcgcggtgatttgtttcacgccgccggaagagcctatcccctggtaattgactttgttaccggtttctttctggtaggtatccgcccatttggcatacaccggcgcaggaaacgttgcaccggcacctgtcaggcttgctgctgcaaaggcagagaacgcgctcatcgataaggtcgcggcgacaacagttgcgacagtggtacgcataactttcataatgtctcctgcacggtttcggtaaatcgttgtttgagttgctacgatgagcaaaataggacaaattgatgacagttatatgtcttgattatgacggtttgatgacaatggaaataaaaaaagctggcccggggagacaccagaccagcctgcagggggagatgaattagactgtttgcgcaaccgcagacggtttcaacagcgcgtacatcaggccgcagacaatcgtgcccagggcaatcgagagcagatattgcatcacatgttctaccgcatgcgggatcgccaggacaaagaggccaccgtgtggcgccatcagtgtacaaccgaaatacatggacagtcccccggcgattgcgccaccgaccatcgtggaagggatgacgcgcatcgggtcacgcgcggcgaagggaatcgccccttcagagataaagcacagccccagaataaaagatgcattacccgcttcatgctcagcggcattgaatttcgctctggccgcccaggttgcgacgcccattcctaatgccggtaccatccctgccgccataatggccgccatcggcatataggaatgagaagccagtaaaccgacgccgaaggtatacgcagctttattcaccggcccaccaaggtcaaaaccttgcattgcgcccagcaacattcccagcaagatagcattcgtagaggtcatattccccaggaacgtcgtcagcccttccatcaccgcagacaccgggccacccaccacgtaaatcatgattaggccggtaatcagcgtagacagtagcggcagaaccagcacaggcttaagcgcttccattgacgctggtagcttaatattttgcgccagaaaccgtacgctgtaaccggccagaaaaccggccacaatccctcccaggaaaccggcgccgcacaggctggccaacatcccgccaataagccccggggccagacccggacgatcggcaattgagaaggcaataaacccagccagtaccggcaccatcagcgcaaaggccgccttaccaccgatttgaaataacgcagccgccagcgtgcccggctcgttgaaggcctggataccgaagacaaaagagagtgcgatacacaatcctcccgccaccaccaaaggaagcatatgggatacgccggtcattaaatgcttataaacgccgggtagctctgttttaccagctgaagaagagcgcccggcactcccctgatagacctcggcgctattgaaagcattatccatttcctgcgcactcttttttagcgccgcgccggtactggtgcgatagagtcttttgccaacaaagcctgacagatccagctcaatatccgccgcgataatcaccacatccgcctgcgctatctcttccgcggtcagcgtgttcttcgccccgacggaaccgcgggtttcaaccttgatccagtcaccacgcttgcgggcttcaatttccaacgcttctgccgccataaaggtatgggcgacgcccgtcggacaggccgtcacagcaacaatttttttagtcatagtagggtaccctgttcttttaatttaaagaaaaagcgggaaaaaatgttacaggcgtgaccaggccgctgctttctggaacagcgcgtcatccgggcgaatcccggtataaaggacaaattgctccacggcctgaatagcaaacacttcggaaccggtaatcacggttttaccgcgttcacgggcgtagcggattagcggcgtgacgggcggtagcgccaccacatcaaagataacgctcgccttatccacttcctgttcggaataagaaagtttgtcggcatcattaccgccagccattccgataggcgtggcgttaattaacaaatcagcttcaataccgtcggtatccgggcgccattcatagccatagagttcggccagttgtttacctgacgcttcatcaatcgcgacaatataaccacgggtaaaccccgcatccttcagcgcgcaggccaccgcctttgccataccaccgctgccacgcaaagcaaacaccaggtcgggagagaccttgtaattcgccagcaagcgagctattgcaatgtaatcggtgttgtacgccttcagatggccattggtattcacaatggtattaactgagtgaatggcctgagcggaagcatccagttcatccaccagcggaatgcaggcttctttaaacggcatagagatcgcgcatccacggatccccaacccgcgcacgccgctaatggcctgcgtaagatcggtcggcgaaaaagctttgtagagataattgagatccagcgcttcgtacagatagttgtgaaagcgtgtaccgaagttacttgggcgtgccgccagggacatgcagacctgagtgtctttattaatgcgctttgtcatgatgaatcctcatagaagttgcgatagagaaaatcatcggctaaaaaggggatattaaaaattgctcattcccgttcgggaaatttcaccttttatgacaacccggcacactgaacaaaaatacttaaagctactccagcactatggcgacaagcctgttagcgtgacattacaggagctggcggatgtgttgttctgcacccgacggcatatgcgtaatctgttgcttcagatgcaggaggcaaagtggctcatctggcaatcacaggccggacgtgggcatcgcgcccggcttcacctgcgctataaaccagaacagctgttaagcgaaaaggcggagcagttactggagtctggtcatattgatcaggccattcagctgctgggtaaaaataagcaccaggtggcgcaactgctgcgttcaaagctgggctatagcgtgcgggcagactatcagcggctgtgcatcccctattatcggacaatgccgtcgctgtgccccggcataccgttgcgtcgctctgagcagcatctggtcaggcagatttttagcggcctgacgcgcataaatgaggaaaaaggtgaagtcgaagccgatcttgcccaccactggcggcagattgatccactgcgctggcgtttttatctgcgccccgccgtcctctggcatgatggtcaggagctgacgatcgacgcggttatcgcttcactgacccgcagcgctaagctgccgttgttctcgcacttgcagaccattcaggccaccgggccgctgagccttgaaattacgctggcgcacccggataaccgactgccgctgctgctcagccatattgatgccatgatcctaccgcctgaccatacacaacgcgctgatttcccggcacatcctgtggggactggcccttatgaggtggtggaaaacaatggctttcatctacaaatgaaggcctttgaccactatttcggtctgcgcgggctgctggatgaagtggaggtctttatctggccgaatttaacggagacagacaacctggcggaatcgctgtcggataacgacacggcagcctggctcagctccagcctgagcgatgaggattacgtttccggacggcttagccaggtatcaggcaaaccttctgacaacctgcgcgagatgtttcttgagcgtggaggatattttttattatgcgacagccgctccccgcactggcataccgccgaacatcgccgctggctacgggaaacactcagcccttacgccatactccagcatctgagtgaggcaattcgccccttctgggtaccgggcggcagcctgctgtcctcctggtttcatactattgaggcgggcccggcctgttcaccttttatctcgtcgtcgccctacgcaaaactgcgtctggcctatcacgatcagcaccctgaatttccaatgctcctggatatcatgcaagagatcatgcgccagcagggcattttacttgagggcgttgagctgaattatgatgactgggcgaatggcaaagccaatgtggatctctggctggggacggtcaatttccccattcccgaagagtggaacgtcggtacatggctactgggctcccctttactgcgccacgccatcagtggtggggatgatgcgctgctggcccaatgggaaacccagtggcatgccgaaaccatcagcgcggaacaactggtcagggaaaccacccgttcaggctggctacagccgctttttcaccactggatgcgactcaaaagccccgaccgggccagggggatccacctgaataacctggggtggtttgatttccgatccacctggattgagccagggccttaaagaagagaatgtgaccgggtgcccgtagcgcaggcaggcgtagcacctcttagtcgctcttcagccaccatagagaaagaacagcgcctgtcacagcgcacaaaaaaaggccgtctgtcgacggccttctgcctggtactacatttgtacttactctacggtaaccgatttcgccaggttacgcggctggtcaacgtcggtgcctttaatcagcgccacgtgatacgccagcagttgcagcggaacggtgtagaagataggcgcaatgacctcttccacatgcggcatctcgatgatgtgcatgttgtcgttgctgacgaaacccgcatcctgatcggcgaagacgtacaactgaccgccacgtgcgcgaacttcttcgatgttggatttcagtttctccagcagttcgttgttcggcgccaccacaatcaccggcatatcggcgtcaatcagcgccaacggcccgtgtttcagctcgcctgcagcataggcttccgcgtgaatgtaagagatctctttcagcttcagcgcgccttcgagcgcaatcggatattgatcgccacgccccaggaatagcgcgtgatgcttgtcggagaaatcttctgcaagcagctcgatgcgtttgtcctgcgacagcatctgctcaatacggctcggcagcgcctgtaggccatgaacgatatcatgctcaatggacgcatccagacctttcaggcgagacagtttcgccaccagcatcaacagcacggttaactgggtggtgaaggctttggtagatgctacgccaatttccgtacccgcgttggtcatcagcgccagatcggattcacgcaccagcgaagagcccggcacgttacaaattgccagagagcccaaatatcccagctctttcgacagacgcaggccagccagggtatctgcggtttcgccagactgtgacagggtgatcatcaggctgttacggcgcacggcagatttgcgataacggaattcagaggcgatttcaacgtcgcacggaatacctgccagcgattcaaaccagtaacgggaaaccataccggagttgtaagacgtaccgcaggcgaggatctgaatatgctcaaccttcgacagcagttcgtcggcgttcggtcccagctcgcttaaatccacctgaccgtggctgatgcgcccggtaagggtgtttttgatcgcgttcggctgttcgtagatctctttctgcatgtagtggcggtaaatacctttatcgcccgcgtcatattgcagattggattcgatatcctgacgttttacttccgcgccggtgttatcgaagatatttaccgaacggcgagtgatttcagcgatatcgccctcttcaaggaagataaagcgacgagtcactggcaacagcgccagctggtcagaagcgataaagttttcgcccatacccaggccaatcaccagcgggctaccagaacgtgccgccagtagggtatccgggtgacgggtatccataattaccgtaccatatgcgccacgcagttgcgggatagcacgcagaacagcctcacgcagagtaccgccctgtttcagttcccagtttaccaggtgtgcaatcacttcggtgtcggtttcagaaacgaaggtatagccacgcgcttttaacgcttcacgcagcggttcatggttttcgatgatgccgttatgcaccaccacaatgtgttcagaaacatgcggatgcgcgttagcttctgaaggttcaccgtgcgtcgcccagcgagtgtgagcaataccagtgccgccatgcagaggatgttcttccgctgcctgagccagcatctggactttaccgaggcgacgcaggcgggtcatatgaccttctgcatccaccacggccagaccggcagagtcatatccgcggtattccagacgacgtaaaccttcgagaaggatttcagctacatcacgctgcgcgatagcgccaacaattccacacatagttttatttcctgattatggcattacgccatgcgttgtcgctgacctgtatgcccgtcgttgcgggcgccccgagccttgtagagagtggggttatttttataagtactgctcatggagcggaggattattttatcctctcatctccggtctgccggatggcgctgacgcttatccgacctacaaaatcactttttcttcaccggacgctgccagccttgcttatgcacctgcggcacgcggcttaataccagttcattgtcggctacattacgggtgacggtagtccctgcggcgatggtggcccctttaccaacagtaaccggcgccaccagttgggtatcggagccgacaaacacatcgtcgccaataaccgttttgaatttgttcgcgccatcatagttacaggtgatggtccccgcgccgatattcacgttgtcgccaatttccgcatcgcccaggtaggtcagatggccggctttagaacctttaccgagacgcgcttttttcatttcaacgaaattgccgacgtgagcgcccgctaacagctccgcgccgggacgcaggcgagcaaacggaccgatggtgcaggccgcttccagatgcgcatcttccaccacgctgtatgggctaatttcgcagtcatcgccaataacgctgtttttaataatgcagcccgcgccgatcttcacgcggtgaccgagcgttacataaccttcgatgataacgttagcgtcaatttccacatccattccacaatgaagggtgccgcgaagatcaaaacgtgccggatcgcgcaacataacaccggataacagcagtttctccgcctgttcggcctggtaaatacgctccagacgagaaagctgtagacggttattcacgccgtccgtttcgctgatgcgagccggatgcaccgcggcgatttctcgtccttcctgataagccagcgcaatgatatcagtgatgtaatattcaccctgcgcattattgttagtcagcttagacaaccaacgtttcatgtccgcgccgttggcgatcagaataccggtgttaatttcctgaatctgacgctgttcatcagtggcgtctttatgttcaacgatgccggtcactttaccgttttcacgcgtaatacggccatagccgctcggatcgtccagcttcacggttaataacccaataccaccctgcggtttggcatcgcgcaggcgctgtaaggtttcaaccgaaatcagcggcacgtcgccgtaaagcattaaaatatcttcatcgtcgctaaagaagggcgcggcctgctgcattgcgtgacctgttcccaactgttccgcctgaagcacccagttcagcttgtcatctttcagggtctgttttaacaactcgccaccgtggccatagaccagatgaacctgtgcggcccctaatttagtagctgcatcaatgacatgctgcaccatgggtttacccgccagcgtgtgcagcactttaggaatatcggaatacatgcgtgtgcctttacctgcggcaaggatcactacgctcatagcactatttaacatacgcgtcctgactgtaatttgagaacgaatttatactgtttcacgttgaaaatactacatttttttcatcgtaaaatggaagaaggataaaacgctcaccgggataaaatccccgcctgctaatgaatcattttcgttcattaccgcgcctcttgtctcctgaaaagtaaaaacacccgcgtattggcaacgtagtccgatgtttttgctgtttttttactccataaataaagaagataacgtaataaagcgcaggggagtcagaaaagcaaaaaccagcgacagaggccgctggttttccgttgcgcgtattttttacttaattacgcgacataaaaatccgcaaaatataccagaacatggtcgcgatagaagcaaacagatgtaatgccgcgccagcagggcgatcggtagggtaatggtgaataatgttagaagtatcgtaaagtataaacccggcgcacagcagtaccattagcgcagaaaaccagacgcccagcgagaagccgcagatgacgctggcaataatcgcgccaaaagcaatgaacccagccatagtcagaaacgagcgcagaaaagaaaagtctttttttatagaaaaagcggtaaacgtcaggccgccgaccagcaacagagtcgttattgccgccgcgccaatgctcgacgggttaatatacgccgccaccgttaacaggggggcaaaaatcagggattctgccaacacataaatccccagcccgataagttgcgtttgattattccccgcattatccgccagacgggtcgccagcattcccaccagcataaaagcgccgagaacaaccaaccagctatatcttccaccagccagcagcacatcaagcgcatactccccgacccctataaaactccacgccgcgctcaatacgataaaaccgacgatggcgacggcgagatgaagataagcacgacgaataaaggtagtacgatcaatccttgagtcgggttgtggacccgcaaaggatggctgaaatgacatagtaataatccctcattttatgcaataaaaacgcatccattcctcccttcttcgcacaatgtgcagatgccaatgacagaaagaaggatttaatgaaaacagcgctgtcgctgaaaacgcgtcgccttcagccgcttgtttttgtcgttgctagtttatcgaataaaaattgagaggataaaaaaaaaccagtccgcaatcagactggttttatgctttcaagccggtgttacatcgcttttttggtcaactcgataacgcgcagtttagcgatcgctttggccagttccgcagacgcctgagcgtaatccacgtcaccgtgcgagctcttaatgtgctcttcggctttacgcttcgcttccagggctcgcgcttcgtcgagatcctgaccgcgaatcgcggtatccgccagaacggtcacgctgccaggctgcacttccagaatgccgccggacagatagataaactcttcatgaccgtgctgcttaacgatgcgaatcataccaggcttaatggcggtgagtagcggcgcgtgccccgggtaaatccccagttcgccttcgctacccgtaacctggattttctcgaccagaccggagaacatttgttgctccgcgctgacgacatccaggtggtaagtcattgccatatcaccctccgattaaggcgttaaagttttttggctttttccacggcttcgtcgatggaaccgaccatgtagaacgcctgctccggcaggtgatcgtattcgccttccatgatgcctttaaagccacggatggtgtctttcagggagacgtatttgcccggagaaccggtaaatacttccgccacgaagaacggctgggacaggaagcgctgaattttacgcgcgcgagctaccaccagtttatcttcttcagacagttcatccataccgaggatggcgatgatgtctttcagttcctgataacgctgcaggatggactgaacgccacgcgcggtgtcgtagtgttcctgaccaacaaccagcggatccagctgacggctggtggagtccagcgggtcaacggccgggtagatacccagggatgcgatctgacggctcagtaccacggttgcatctaagtgcgcaaaggtggtggctggagacgggtcagtcaagtcatccgccggtacgtataccgcctgtacggaggtgatagaaccggttttggtggaggtgatacgttcctgcagaacgcccatctcttccgccagagtcggctggtaacctactgcggaaggcatacggcccagcagtgcggatacttccgtaccggccagggtgtaacgatagatgttatcgacgaacagcagtacgtcacgaccttcgtcacggaatttctccgccatggtcagaccggtcaatgcaacgcgcagacggtttcccggcggctcgttcatctggccatacaccagggatactttatcgataacgttggagtcggtcatttcgtggtagaagtcgttaccctcacgagtacgttcccctacgcccgcaaacactgagtaaccggagtgctcgatcgcgatgttacggataagctccatcatgtttacggttttacctacacccgcaccaccgaacagaccgactttaccgcccttcgcgaacggacacatcaggtcgataactttgataccggtttccagcagttcctgagagtttgacaactcttcgtaggaaggcgctgcgcggtgaatcgcccaacgctcttcttcgccgatctcgcctttcatgtcgaccggttcgcccaggacgttcatgatacgacccagcgtagctttacctaccgggacttcgatcgggtgttcgagatcttttacatccagaccgcgacgcagaccgtcagaagaccccatcgcgatggtacgcacaataccgccgccaagctgctgctgaacttccagcaccagcttctcattaccattctgcacctcaagggcatcgtacacgcgtggtacggcatcctgagggaactcgacgtcgaccacggcgccgattacctggacaatctttccagtagccatcttaaatcctctacgaaataacctggttaaaccgcggcggcccccgagacgatctcggtgagttcctgagtaatgctggcctgacgagctttgttgtataccaactgcagctctttaatcaggctgccgccattatcggttgcggctttcatcgccaccattcgtgcggcctgctcgctggccaggttttctaccacgccctgataaacctgagactccacataacgacgcaggagagtatccagcagcgctttcgggtctggttcatacaggtaatcccaggctttacgcttcagatcatcatcttctgacgccggcagcggcagcagttgagtgatcgtcggcacctgagacatggtgttaataaatttgttgctgacaatgtaaagcttgtccagacggccttcgtcgtaggcctgcaacatcactttaaccggaccgatcagttcggacagagaagggttatcccccatacctgtcacctgagcgacaacgttgccgcctacggaattaaagaatgacacgcccttagagccgatcattgcgagttcgcactgaacgcctttatcggaccatgccttcatatccgccagcagctttttgaacaggttaatgttcaagccaccgcacaaaccacggtcggtcgacactaccaggtagcccacgcgtttaacgtcgcgctcttccaggtaggggtgcttatattccagattaccgttcgcaaggtgaccaatcactttgcgcatggtctctgcataaggacggctggccgccatgcgatcctgcgatttacgcattttggaagcggcgaccatctccatcgctttagtgatcttttgcgtgttctggacgcttgcgatcttactacgtatctcttttgcgccggccatgagcttctcctcaatgccttacggcctgccctaaggcaagccgccagacgttaccaggactgggttgctttgaaggaatcgaggatgcctttcagcttgccttcgatttcgtcgttatagccaccggactggttgatctcttgcatcagcggagcgtgatcacggtcgacgtaagccagcagtgcggcttcgaagctaccgattttcgccagttcgacatccgccagataaccacgttctgctgcgaacagaaccagagactgctgcgcgacggacatcggcgcatactgtttctgtttcagcagttcggtcactttctgaccgtggtcaagctgtttacgggtggcatcgtcaaggtcggatgcaaactgagagaacgccgccagttcacgatactgcgccagcgcggtacgaataccaccggacagttttttcatgatcttggtctgggctgcgccacctacacgggataccgagatacccgggttaaccgcaggacggataccggcgttaaacaggttagattccaggaagatctgaccatcggtaatggaaattacgttggtcggaacgaacgcggaaacgtcacctgcctgcgtttcgataatcggcagcgcagtcagtgaaccggttttccctttcacttcacctttagtgaaggcttcgacgtagtcggcgttaacacgcgcagcacgctccagcagacgagagtggaggtagaatacgtcgcccgggaatgcttcacgtcctggcggacgacggagcagcagggagatctgacggtaagcaacagcctgtttagacaggtcatcgtaaatgatcagcgcatcttcgccgcggtcacggaagtattcgcccattgcgcaaccggcatacggcgccagatattgcagcgcagcggattcggacgcggtcgccaccacaacaatggtgttagccagcgcgccgtgctcttccagtttacgcaccacgttagagatggtggacgctttctggccgatagcgacatagatacatttgatgccggagtcgcgctggttgatgatggcgtcgatagccagcgcggttttaccggtctgacggtcaccgatgatcagttcacgctgaccacgaccgattgggatcatggagtcaacggctttatagccggtctgcaccggctgatcgacagactgacgatcgataacgcccggcgcaatcgcttcaacggcagagaagccgtcattatcaaccggacctttaccgtcaattggcgcacccagggtgtttaccacacgtcccagcaggccgcggccaaccggaacttccaggatacgacccgtacatttaaccttcatgccttcggcaaggtcagcgtatggacccatgactaccgcacccacggagtcgcgctccaggttcagtgcgatagcgtaacggttacccggcagggagatcatttcaccctgcatacaatcggccaggccgtgaatgcggataacaccgtcactgacagaaacaatagtaccttcgttgtgagcttcgctcaccacattgaactgagcaatgcgctgcttgatcagttcgctgatttcggtggaattcagttgcatgctccagtccccttaagactgcaagacgtctgcaaggcgctcaagacggccgcgtacgctgccatcaatgaccatatcacccgcccggatgataacgcctgccattacagacttatcgattttgcaattcagcttcactttgcgtgacagacgtttttccatcgcggcgctgattttcgaaagctgctcttcactcaatgcggttgccgacgtaacttctacctcggaggtagcttcactggcggcacgcagatgaataaactgctccagaacatccgggagcgcgttcagacgattattttcagccatcacccgaatcaggttctgaccgttttcgtctaactgctcaccgcagactgcgataaacgactcagcgagcgtttccggcgccagcgcgccagagagaagctctgccatttgttcgttcttggttacctcggcggcaaacgccagcatatcctgccagcgctctacactttggtgttcaacggcaaagtcaaaagctgctttggcgtaggggcgagctaccgtaacaaattcagacatcagcccctccctccttacagttcagcgacaagtttatccacgatgtcgctgttagcagcttcatccacggaacgttcgatgatcttctcggcgccagcaacagccaggatagcaacttgcttacgcagctcttcacgggcgcgtttacgctcggcttcaatttccgcctgcgcctgcgccacgattttagtacgttcctgctctgcttcagttttggcttcgtccaggatctgagcgcggcgtttgtttgcctgctcgatgattacctgagcttccgctttcgcttttttcagctggtcggtcgcgctggcctttgcaaggtcaagatccttatgtgctcgttcagcagaagcgagaccgtcagcaatttctttctgacgtttctcgatggctgccattaacggcggccatacgtacttcatgcaaaaccagacaaagagaataaacgcgatggcctggccgaggattgttgcgttaagattcacagcacaatgcctctatctagttaaccttctgatattgctcttaattcaagcaacgcttactacgcgacagcgaacatcacgtacagacccagacctacagcgatcatcgggatagcatccaccagacccataacgataaagaactgagtacgcagcagaggaatcagatcaggttgacgcgccgcgccttccaggaatttacccccgaggatgccgataccgatcgcagcaccgattgccgccagacccatcatcacagcggcagccatgtacagcagatccatattcaggttttccatgacagtctccagtttgtttcagttaaaacgtagtagtgttggtaaattaatgctcttcggacgccatcgacagatagacaatcgtcagaaccatgaaaatgaaggcttgcagcgtaataatcaggatgtggaaaatggcccacggcacattcagaatccactgtgaccaccacggcaacagaccagcaatcagaatgaaaatcagctcaccggcatacatgttgccgaacagtcgcagaccgagagaaaccggtttggacagcagacttaccccttcaaggattaagttgacaggaatgaacgcccagtgattgaacggctgcagcgtcaactcttttgcgaagccgccgatgcctttcattttgatgctgtagaacagaataaggatgaatacgcccagcgccatcgacagggtgatgttgacgtcagcagacggcaccacgcgcgttgccggcagacccagccaatgctcagcgatatacggcagcaggtcgataggcagtaagtccatcaggttcataaggaatacccagacgaaaatcgtcagggccagcggcgcaatcagcttgcttttgccatggtacatgtctttgacgctgccatgcacaaagccgactatcagctcaatcgcggtctgaaacttgcctggcacgccgctggtcgcttttttagcaacgctacggaacatcaccagaaacaacagacccagcaccaccgagaagaacatggagtcaatattgagcgtccagaaggtggctggggggttctgcggatccaccagcgagaaagtacgcaggtccaactgaaggttattcagatggtgtcctatgtattcctgcggcgtcatattttctgaagccatgatgccttttaccctttgttgttaattacagccggcgccagtatctgaaccaccagcaccaaaacccacgtaacgatcagcggcaaaaacaccgcctttaaaaccgccaacgccaccaccagtaaaaccagcatcgctaacaccttgaaggcttcaccgaaggcgaaagtccaggacacgcggcccttagcaggtgtatgcgcctggtgacgccaggcaaatatcataaacaacatattaggcagtgccactgccaatcccccacatactgcggagatgccccagaaggggtctttgaggcaaaacagcaatccacttgctattaccgccagaaactgaatgaacagaagcttacgagcaacgtttcgactcacgagcgacacagacatcacgtttttactcctgctcacttcgaggtatgccgcgtgtcgtataaaacgttctttaagacttagagtcaagcatcaaaaagcggtcaaattatacggtgcgcccccgtgatttcaaacaataagtagccaaaaggtgaataaatgtttaaatatttttctctggcccgcatttttaacttttagccaaagtgtgaacgatcgtacaaaactgcaaatagcgcgaaaacactggcgataaagcgtgcaccagatcacacattaaacatattcatgcttacgcaattcatttacgtgtcaattcatgccttttcatctttttgatatttaagcgtaaaaccaggtactgttttaaaaataccagcttacaccttaaaaacgccccattgacatttataataaaaatttaacaagcaaaagtgatttttcgattcgatttttagcagactgatatttacaaagttgattactctctgttttaacaaaagaagcgacgttgtcatgttgaaacgaaaccgtaaatccagagttaaatgtaacaacgctgaaatgcgttatacctgtcgatttttaacacaagccgcgtcgttttttttctattttttttgataaaaattaaactttgtttgacttaataatcaccagatgccgctcgccttccagttgcggaacgcgtaatttttcaacagattcgacgctaaaattgtcaggtagtgaggcaatttcatcccctggcaattgcccttttaaggcataaaaacgccctttctctcccggcagatggtggcaccagctcaccatatcattcaacgatgcgaaagcgcggctgataacgccatcaaacggcggttcggagggataggcttcaacgcggctttgaaccggcgtgatgttttccagtttcagttcgtgctggacctgacgcagaaaacgtacccgcttgcccaggctgtcgagtaaggtgaaatgcgcgtcagggagaacaatagccagcgggatgcccggcagccccggtcctgttcctacgtcgataaaacgctgtccctgaagatacggcgcaacgactatgctgtcgagaatatggcgtaccaacatttcgttgggatcccgcactgacgtcaggttgtatgctttgttccatttgtgcagcatatcaacgtaggcgaccagcagcgttttctggtgatcggtaagagaaataccggcatcagccagcagacgagagagtttgttgagcacggtcattacctgttaataatcaaatgcccgatgcgctttcgcttatcgggcctacaaatttgtagggcgggcaagcgaagcgcccccgccaaattagtgttatcaagcgctacgacgcagcataccttgttttttcagccataccagcagaatggagattgccgctggcgtaacgccggagatacgcgatgcctggccgatagacgccggtttatgatcgttcagcttggcgataacttcgttcgacagaccggaaacctgacgataatccagcgtggcaggtagcaacgtattctcgttacgtagttgtttttcaatctcatcctgctggcgagcgatatagccttcgtatttgacctggatttccacctgctcagcggcttgctcatcttcaagcgcaggcgcgaatgcggcaagcgaagtgagctgcgcgtaggtcatttccggacgacgcaacagatcttcgccgctggcctcacgggagagaggcgtggtcaaatgcgcattcacttcatcggcggattccgcagacggcgttacccatgtcgatttcagccgctgacgttcgcgttcgatattttccagcttctcgttgaagcgcgcccagcgttcatcatccaccagacccagctcgcggcccatttcagtcagacgcagatcggcattgtcctcacgtagcatcagacgatattcggcacgggaggtaaacatgcgatacggctctttggtgcccagcgtacagagatcgtccaccagcacgccgagataagcctgagaacgcgcaggcgcccagccctctttgtcggcggaaagacgcgcggcattcagaccagcgagcaagccctgcgccgcagcctcttcatagccggtagtaccgttgatttgaccagcaaagaacaggccgtgaataaatttactttccagagtcggtttcagatcgcgcgggtcgaagaaatcgtactcaatcgcgtaaccagggcgaacgatcttcgcgttctccataccctgcatggaacggacaatctgcatctgcacgtcaaacggcaggctggtggagataccgttagggtaaatctcgttagaggtcagtccttccggctcaaggaagatctgatgctggttacgatcggcaaaacgcatcaccttgtcttcgatcgaaggacagtagcgtgggccgatcccttcgatcacgccagcgtacattgggctacgatcgaggttattacgaatcacgtcatgggttttctcattggtatgcgtgatgtaacacggcacctgttgcggatgctgagaagcattccccataaacgagaaaaccggcatcgggttatcgccatgctgttgagccaacacgctgaaatcgatagtacgcgcatcaatacgcggcggtgtgccggttttcaggcggctgacgcgtagcggaagctcacgcagacggcgagacagcgggatggatggcggatcgccagcacgaccgccgctgtagttatccagaccaatatgaattttgccatccaggaaggttccgacggtcagtaccaccgctttcgcgcggaatttgagccccatttgggtcacggcgccgacaacgcgatcgttttcgacaatcagatcttcaacagcttgctggaagatcatcagattcggctgattctccagcgcggtacgcaccgcctggcggtataagactcgatccgcctgagcccgggtagcgcgaacggccggacctttgctggcgtttagtatcctaaactgaatacctgcctgatcgatcgctttcgccatcagaccgccgagcgcatccacctcttttaccagatgtccctttccaataccgccgatcgccgggttgcagctcatctgtcccaacgtgtcaatattgtgtgtcaaaagcagagtctgttgacccatacgcgctgcggccatcgcggcctcagtgcctgcatgacccccgccaataataatgacgtcaaaaggatcctgataaaacatggtaattgcctcgcataacgcggtgtgaaaatggattgaagcccgggcggtggattctactcaactttagccgatggagaaagccccgggatccgggctattaaaaagaagatctttttatttagagatctgttctattgtgatctcttattaggatcgcgccaggctgtggataacccggatcctgtaataaagatcaatgcgttggaaaggatcactagctgtgaatgatcggtgatcgtggtccgtataagctgggatcaaaacgggtacttatacacaactcaaaaagtgaacaacggttattctttggataactaccggttgatccaagctttccaccagatttatccacaatggatcgcacgatctttacatttatttgagtaaattaatccaggatccgagccaaatctccgctggatcttccggaatctcatgttcaaggatgttgatcttcagtgtttccccaacctgttttgcgccagcgcctttcagttccgcttctattttctcaatcgcgccgcaaaacgtgtcgtattctcgactgccaatgccaattgcgccgaaacgtaccgcggaaagatcgggtttctgcgtctgaaggtcttcatagaaaggggtcaggttgtccggaatgtctccggcaccgtgcgttgagctgattatcagccagatcccggaagttgacagatcctctaataacggaccgtgcaccgtttcggttgaaaaaccggcagcttccagcttttccgccagatgttccgcgacgtattcggcgccgcccagggtgctgccgctgataagagtaatgtctgccattgatcgctcgctcaggtaaagaggctgcattgtactctgtgaacgagctgggatctacctgtggaaaaatgtgggattaaaaaagccgatcatggcttgatggtgcgcatgatcgggttctgcaagacgatcagtgtctcagtggactgaatttcatcaattgtttggatcttgttgataagtacgtgctgaagcgcgtcgattgatttgcacatcacttttataaagatgctgtagtgaccggtggtgtaatacgcttccgtcacctcatccaggctttccagccgggccagtgcggagggatagtctttggcgcttttgaggatgatgccaataaagcagcccacatcgtagcccagttgtttagggctgacgtcaatccgtgcgcccgtaatgatcccggcctgcttcattttctcgacgcgaacgtgaatggttccagggctaacgccaaattgtttggccagttcggcgtaggcggtgcgggcatttcccattaaggcgtcaagtatgccgcggtccagattgtcgatctgataattttccatcgctttttcttatgcagattaatgattatctctattttagccattatttttaacgaatcaaaaccgaagttagctttttatctgttgattattgaatagtgctctcgttttgttgcttaatcataggcaacaggacgcaggagtaaaaaaatgaaaaccgcttacattgccaaacaacgtcaaattagcttcgtgaaatcacatttctctcgccagctggaggagcgtctgggtctgattgaggtccaggcgccgatcctgagtcgcgtaggggatggtacgcaggataatttgtccggctgtgaaaaagcggtgcaggtaaaagtgaaagcattgcctgacgcccagttcgaagtggtgcattcactggcgaagtggaaacgtcaaaccctggggcaacatgacttcagcgcgggcgaagggctgtacacgcacatgaaagcccttcgccccgatgaagaccgactctctccgctccactcggtctatgtggatcagtgggactgggagcgtgtcatgggcgatggcgagcgccaattttccaccctgaaaagcacagtagaggctatatgggcaggaattaaggcgacggaagcagaagtgcataaacagtttggtctggcgccgttcctgccagagcaaattcagtttgttcacagtcaggaactgctggcgcgtttcccggatctggatgcgaaagggcgcgaacgcgcgatcgccaaagaacttggcgccgttttcctggtggggatcggcggtaaactgagcgatggccaccgccatgatgtacgcgcgccggattatgatgactggagctccgcatctgagctgggctacgccggtctgaacggcgatatcctggtgtggaacccggtgctggaagatgcgtttgagctttcctctatgggtatccgcgtagatgccgatacgctgatgcgccagctggcgttgaccggtgatgaagatcgtctgcaactggagtggcatcaggcgctgctgcgcggcgaaatgccgcagaccatcggcggcgggattgggcagtcgcgtctgacgatgttgctgctgcaattgccgcatattggtcaggtacagtgcggcgtatggcccgcgcaggttcgcgaaagcattcctgctattttataagccgttagcgccgccagcgtctcagcaggcggcttcgcatcccggtgtcaaagcgccagatatgatcgaaaatgcgcatgatgccgggtttgccgtgcgccgacatcgccaccgcatggaatcgatgctggtgaagacgctgcaactctcccactttgctcaccacgtcatccggcaagcgctgggcgataaaatccgaaatgaccaccgcatcggcatcaaaccattcccgtccctgcattctttcaataatggcgcgaaaacagctggcgatatccgtgccgccgcgaaaacgttgacttaaaaagcggatggcctgctcgataccttccgggccggagagttcatagcgcacaacgtcagtggaaaacagcataataaagcagcggcggttatccgccagcgcaacgcgcatcaacgccaggcagaacgcttttgcgcactgctcgttaaatcctcccatcgagcctgaagtatcgacgcagacaataaacggtccgcgcggctgctcgtcgacatcctggtgtactaccggccgttcggtcactttctcacgccacgcttcgccatgcaggcgataggtgaggagctgtttttccactaaccggcggtaaaattcatattccagctcggtgatgccgagcgtcgccagctctggcggcaacaggcgcagaatatcatcgccttgctgaataccgtcaacctgctccggcaccgttgcgggttcgcgtaccagtgtacgaaaggtttccatcggcgcgtcttttttcggtaccgatttggcttcccgcgaacgtcccagttgttccgccagttgcattagctccggctgggcggcgagaaattcgccgtattttacgatcagttgataatcaccacgtttaagctggcccgcgctcatatcccacaggcggcctgcggcattatcattttccgccagcgtcggttccagttgcccgctcagcgtcatccgttcctgaacgtcactcagcaactgctcgcgctcttcttccagtagttgttggtttaacgtggtggcctgcacgaccagacttaaccgccagcgttgcaaaaaaagcgtgtgtagcgcaggggtaaaggtactgttgctctccgtcaactgcttcgcctgcgcggcatacggtgaatgcaggcggtgaagcaacgccagtatttgcggcagttgcacgatgaactgtggggtagagagaagttggctttgctgataacacatgacctcttccgtgagttccggcggaacgcgtgcgtctttaagacggctgcgtagcgcttcccgccagcgcgggagatcggcggtcacggcgttttttaaacgcggaaacttttcaaagaaaatgaccagttgtggggaagccagtagcgcgaggatcatctcttcgaccattccctcttcgctgacggccagcatggtatttagcgtatccagcgtcagcattgtttcgcctggcggatctgttctcctacatcctgcaggctggcctcaatgcgccctaaccagtcgctgtgaataaacaggcaatgttgctgttcgctgaagcgggtatgctgctggcgccagtcgttttctaacgtttccagctgctgtttgatctccgcaggcatactgtcttcagccgttcccggtaacgccagacgggtaccttgtagactgatgtcgcgcaccaccagatgttgagcgttatcgacttccatattcagcgtttgggcaaagccgatcccgttcagtttgccgcggatctcgccgcctttggtcagccaaagttccagcgcgctgcggtcaaaggtaatatggatcacttccatatcatgcaatttgagcggtttttgtagcaataacgtcaacgttgacgcactggcttccggcggtaaagtgtaatgcgggcgacggctgaacataccgccttctttaatgacggtgaaggcggttttatcgctttgctgttgctgcaactgaaggcgacgctggacgataccgccgaggcgagtcagcatggcctgctgctgccaggcgtgtccggtcatcaatatttccagttgctgttgcatgagattcagactctgcgcgtcataccacaagcaatcttttagcaggataaggtcaatcggcgcaaccgcgtcgcgtccgctaaagaaggcgctggcctgtaacaggcggatggctttcttccagcgacggtcggagacataaggcgcattcggcaaattatccagctgttggcgcagagtaaatatcagctcaaagaccggatcagggagtgaaatcgcgccgatatccttttgccactgttgatattcttcgtcgctaacctgtaacgaggcaggtaccgggttatcactttcatcctgctgactgaccagcatggagcggaaattggctttatcctgaactttatccagccacaggcgaatcaacattcggtcgtacaacgcttccaggctgctgtccgcttcgggcagttcgttagaggccgccaccagcagccgcatcggaattttttcctcaaatgcgccgttgcggaaatggcgttcgttaatggcggtcagcaatgtgttcaggatagctggcccggctttccagatttcatccagaaaaacgatttcggcttcgggaaggtagccggtcgttaagcgttcatagcgaccttcatctttcagcgcctgaatagagagcgggccaaaaacctcttccggcgtggaaaagcgtgtcatcagatattcaaaagcgcgggcgcgctggaaagcaaacttcaggcggcgggcaatcagactcttggcgataccgggcgggcccaacaaaaagacgctctcaccgcttaacgccgccagtaggcaaaggcgtatggcatgactacgttcatacagccccttctcaagggcgctgctcagacgggaaattctttccgctaataaatgtgggtgagccataataaagaggcgtcctttcgacaaatggatcatgctaattgcgagtatagacgtttcaccaccggggctgtaatcgtctgacgcgctgtttatttttctttgagccaggttaatctggcttcatttaggggtacgattttatgattaatcgtgcatactgtgcgcttttttgtgggccaagggactaagcacacatttcatatctatacactcattcattcaaactacatcaaggcggcaaaggagtgaatcccctggcactgacttaaacgtgtgactggggtaagcgaatgcagccgacaaggaggtagggtgaagggtgacgtgtataaacgaaagatgagtctatgagcactgataataagcaatcgttgcctgcgattaccctcgcagctattggggttgtctacggtgatattggtaccagcccgctttatacgcttcgtgaatgtttgtccggtcagtttggttttggcgttgaacgagatgccgtatttggttttctgtcgctgatcttctggctactcatctttgtggtttccatcaaatatctcaccttcgtgatgcgcgccgataacgcgggtgaaggtggaattttgacgctgatgtcgcttgccgggcgtaatacctcggcgcgcaccacatccatgttagttatcatgggactgataggcggcagctttttctatggcgaagtggtgattacgccggcgatttcggtgatgtcggcgattgaaggcctggagattgtcgcgccgcagctggatacctggattgtcccgctctccattattgtgctgactctgttgtttatgattcagaagcacggtacgggaatggtagggaaactctttgcgccgatcatgctgacctggtttttaatcctggcggtacttggcctgcgcagtattatcgccaatcccgaagtgttacatgcgctgaatcctgtctgggcggtacgttttttccttgaatataaaaccgtatcatttattgcgttgggcgcggtggtgctgtcgattaccggcgtagaggcgttgtacgccgatatgggacacttcggtaagttcccgattcgcctggcgtggtttaccgtggtattgccgtcgttagtactgaactactttggtcagggcgcattgctacttaagcatccggaagcgattaaaaaccccttcttcctgttggcgccggactgggcgttaattccgctgctgattctggccgcgctggcgacggtgatcgcctcccaggcggtcatttccggcgtcttttcgctgacgcgtcaggccgtgcgtcttggctatttgtcgccaatgcgcattatccatacctccgagatggagtccggtcagatctatatccctttcgttaactggctgctttatttcgcggtcgtggttgttattgttagctttgagcactccagcaacctggcggcggcctatggtatcgccgtgaccggcacgatggtgctgacgtctattctttctacgaccgtggcgcgtaagaactggcactggaacaaatattttgtcgcgctgatcctcatcgcattcctgtgcgtggatatcccgctgttctcggctaacctcgataaattgttgtccggcggttggctgccgctgagcctgggtctgatcatgttcacgatcatgaccacctggaagagcgagcgtttccgtctgttgcgtcgtatgcatgaacacggtaattcgctggaagcgatgattgcttcactggagaagtcaccgccggttcgggtgccgggtactgccgtatacatgtcgcgcgcgctcagtgtgatcccttttgctttattgcataacctgaagcacaacaaagtgttgcatgagcgcgtaatcttactgacgttgcgtacggaagatgcgccttatgtgcataacgttcgccgggtgcagattgagcagttgtctccgacattctggcgcgtggtggccagctacggctggcgcgaaacgccaaacgttgaagaggtgttccaccgctgcggtctggaaggccttagctgtcggatgatggaaacgtcgttctttatgtcgcacgagtcgttgattgtcggcaaacgcccgtggtatttgcgtctgcgtggcaagctgtatttgttgttgcaacgcaacgccctgcgcgcgccggatcagttcgagatcccgcctaaccgcgtgattgagttaggtacgcaggtcgagatttaacctcccatcaacatgccgggggccgcgttggcttacccggcctggccaatccgtagattcccacaagataatcgcctgatttccgctagcgaaacgtttcgacggcgatcacaattctgttacgtcatgatggttttatgaacacatccggggttacactgcggccagcgaaacgtttcgctagtggagcagaaaaatgaagaaaggcaccgtactcaactctgaaatctcgtcggtcatttcccgtctggggcatactgatactctggtagtctgtgatgcgggtttacccatcccgaatagcaccgcgcgtatcgatatggcactaacccagggcgtaccttcttttatgcaggtggtggatgtcgtgacccgggaaatgcaggttgaggcggcgattcttgcaacggaaatcaaacaacagaatccgcagctccacgaaacgttgctcactcaccttgagcaactgcagcaacaccagggaaacaccataaaaattagttatacgacacacgaacaattcaaaaaattgactgcagacagtcaggcggtgattcgcagcggggagtgttccccgtatgcgaacgtcattctttgcgctggcgtcactttctgaggccgctatggacgcattactgcaactcaaagggatcgataaagcgttccccggcgtgaaggctctctccggcgccgcgttaaacgtttatcctggccgcgttatggcgctggtgggggaaaacggcgccggaaaatccaccatgatgaaagtattaaccggcatctatacgcgagatgcgggatcgttgttatggctgggtaaagagaccacctttaatgggcctaaatcgtctcaggaagccgggatcggcattattcatcaggaactgaacctgatcccgcagttgaccattgcggaaaacatcttcctgggccgtgagtttgtgaatcgctttggcaaaatcgactggaaaaagatgtatgccgaagccgaccacctcttagccaaactcaatctgcgttttaagagcgataagctggtgggcgaactctctatcggcgatcagcaaatggtggaaatcgccaaagtgctgagcttcgaatccaaagtcatcattatggatgaaccgaccgatgcgctgaccgacactgaaaccgactctctgttccgcgttatccgcgaattaaaatcgcaggggcgcggcattgtctatatctcccaccgtatgaaagagatcttcgaaatttgcgatgacgtgacggtcttccgcgatgggcaatttatcgccgagcgtgaagtggccacgttgaccgaagattctcttatcgaaatgatggtgggacgtaagctggaagatcagtacccgcatctggataacgcgccgggtgagattcgcctcaaggtcgataatctgtgcggaccgggcgtgaatgatgtctcttttgtgctgcgaaaaggcgagattcttggcatctccggcctgatgggcgccggtcgcaccgagctgatgaaagtattgtacggcgcgatgccgcgaaccagcggttatgtgacgctcgatggacacgaagtggtgacgcgctctccgcaggacgggctggccaatggcatcgtttatatctctgaagaccgtaagcgcgatggactggtgctcggcatgtcagttaaagagaatatgtcgctgacggcgctggactatttcagccgcgctggcggaagcctgaaacacaaagatgagcagcaggcggtgggggattttatccgtctgttcaacgtcaagacgccttcaatggaacaggcgataggcctgctttccggtggtaatcagcaaaaagtggcgattgcccgcgggttgatgacgcgcccgaaagtgctcattctcgacgagccgacccgcggcgtggacgtcggcgccaagaaagagatttaccagcttatcaaccagtttaaggccgacggcctgagcatcattctggtctcatctgagatgccagaagtattaggcatgagcgatcgcatcatcgtcatgcatgaagggcatctcagcggtgaatttactcgcgagcaggccacccaggaagtgttaatggctgccgcagtgggcaagcttaatcgcgtgaatcaggagtaaaaaagatgacaacccaggctgtttctggtcgccgttatttcactaaagcgtggcttcttgagcagaagtcgctcattgccctgctggtgttgatcgcgattgtttcgacgttgagccccaacttttttaccgttaataatctgttcaatattcttcaacagacctccgttaacgccattatggcggtggggatgacgttggtgattctgacatcggggatcgatctgtccgtcggttccctgctggcgctcaccggtgcggttgccgcttcaatcgtcggcgttgaagtgaatgcgctggtcgcggttgccgccgcgctggcgctgggcgctgcgattggcgccgtcactggcgttatcgtcgcgaagggccgcgtacaggcgtttatcgctacgctggtgatgatgctgctactgcgtggcgtgacgatggtttacaccgacggtagcccggtcaacaccggctttaccgataacgccgatctgtttggctggttcggtatcggtcgtccgctgggcgttcctacgccggtctggatcatggctatcgtctttatcgccgcctggtatatgctgcatcacactcgtctgggacgctatatctacgcgctgggcggtaacgaagcggcgacgcgtctgtctggcattagcgtgagcaaagtgaaaattatcgtctattcactttgcggcctgacagcatcgctggcgggcatcattgaagtggcgcgcctctcttccgcgcagccgacggcgggtaccggctatgagctggatgctattgccgccgtggtgctgggcggcaccagccttgcaggtggtaaagggcgcattgttgggacattgatcggcgcattgattctcggcttccttaataatggtttgaatttgttaggtgtttcctcctattaccagatgatcgtcaaagcggtggtgattttgctggcggtactggtagacaacaaaaagcagtaacaacgactacaggacatctgaaatatgaacatgaaaaaactggctaccctggtatctgctgttgcgctgagcgccaccgtgagcgcgaatgcaatggcgaaagacaccattgcgctggtgatctctaccctcaataatcccttcttcgtgtcgttaaaagacggggcgcaaaaagaggcggataaactgggttataacctggtggtgctggactcccagaacaaccctgccaaagagctggcgaacgtgcaggatttaaccgttcgcgggaccaaaattctgctgatcaacccgactgactccgatgcggtgggtaacgcggtgaagatggcgaaccaggcgaagattccggttatcacgcttgaccgccaggcaaccaaaggcgatgtcgtcagccatatcgcgtctgataacgtgctgggcggtaagatcgctggcgactatatcgcgaaaaaagctggcgaaggcgccaaagtgattgagttgcaaggcattgccggaacatctgcggcgcgtgagcgtggcgaaggtttccagcaggcggtagccgcccacaaatttaatgtcctggccagccagcctgctgatttcgaccgtactaagggtctgaacgtcatgcagaacctgctaaccgcgcatccggatgttcaggctgtcttcgcccagaacgatgaaatggcgctgggcgcactgcgcgcactgcaaactgccggtaaagcagatgtgatggtggttggatttgacggtacgccggatggcgaaaaggccgtaaaagatggcaaactggcagcgactatcgctcagttaccggatcaaatcggcgccaaaggcgttgaagtggcggataaggtgttgaaaggcgaaaaagttcaggccaaatatccggttgacctgaaactggtcatcaagcagtaataaacgacacgggtcaactatggcctgatggcgacagaaatacgcgagcctccgctgaggtgaacgtaaaaaaaagaaaagcagggcacgcgccaccctaaccggtggcgcactttgacgtggaaccccgaatatgaaaaccgcaggtaatctcatcgtccttggcagcattaatgccgatcatatccttaatcttgagtccttccctaccccgggtgaaacggtaaccggtagccattatcaggtcgcgtttggtgggaaaggcgcgaatcaggcggttgctgcgggacgtagcggggcaaatattgcgtttatcgcctgcacgggcgatgacgatattggcgacagtattcgtaaacaattagtcagcgatcgtattgatatcgcgccagttagcgttattaaaggcgagtctaccggggtggcgctgattttcgttaatggcgaaggcgagaacgtcatcggtattcatgccggagcgaatgccgcgttatcgccggcgttggttgatgcgcagcgtgaacgtatcgcgcaggcggatgcgttactgatgcaactggaatcgccgctggaaagcgtactggcggcggcgaaaatcgcccatcaacatcatactactgttgcgcttaatccggcgcctgcccgtgagttaccggatgaactgctggcgctggtggacatcatcacgccaaatgaaacggaagctgaaaagctgacgggcgtgcgtgtggaaaatgacgacgatgccgcgaaagctgcgcaggttttgcatgataaaggcattcgaaccgtattaattaccttaggaagccgtggcgtctgggccagcgtagacggcgagggccgccgcgttcctggatttagcgttgaggctgtcgataccattgctgccggagatacgtttaacggcgcctttatcaccgcgatactggaggagacgccgttgccggaagcgattcgctttgcccatgccgccgccgcgattgccgtaacgcgtaaaggcgcgcaaccttccgttccgtggcgcgaagagatagaagcgtttttacatcagcaggggtaacgcttggctactatgaaagatgttgcccgcctggcgggagtctctacatcgacggtctctcacgttattaacaaagatcgctttgtgagtgagacgataaccgaaaaagttgaagcggcgattaaatcgctcaactatgcgccttctgcgctggcgcgaagcctcaagttaaaccagacccgcacgattggtatgctaattaccgccagtaccaaccctttttattccgaactggtgcgcggcgttgagcgaagctgttttgagcgcggttatagtctggtgctgtgcaataccgaaggcgacgagcaacggatgaaccgcaacctggagacgctgatgcaaaaacgggtagacggtttactgctgctgtgtaccgaaacgcatcagccttctcgtgaaatcatggagcgttatccgtctattcctaccgtcatgatggactggtcgccgtttgatggtgagggcgatagcgatctcattcaggataattcgttgctaggcggcgatcttgctacccaataccttatcgataaaggatttacccgaatagcctgtattaccggcccgctggacaaaacgccagcgcgtttacggctggaagggtatcgggcggcgatgaaacgcgcagggctggctattccgcaaggctatgagatcaccggcgattttgaatttggcggcggctttgacgccatgcaggcgttactcgcccatcaacagcgaccgcaagcggtttttaccggaaacgatgcgatggctgtcggcgcctatcaggcgctatatcaggcggggcttcgtattccgcaggatatggcagtcattggctatgatgatattgagctggcgcgctatatgacgccgccgctgacgactatccatcagccgaaagatgaattgggcgagctggctattgatgtgttgattcatcggatggcgcagcccgccttgcaacaacagcgacttcagcttactccggttttgacggtgcgtgggtcggtttagatttatgccgttctttaatcagattgttgccgtctttggctcttagcagcataaacatcagcgcggacacgatagtgatcgcccccatcgtgataaaggtatagtggaactgttccacggtactggtgcccgcaaaaccttcataaatacgtaacaccgccgcgctgatcgccacgcctaaactgatagacaattgctgcgtaaccgccagaacgctgttgccgctgctggcattatcgtccgtcagatccgcaagagtaatcgtattcattgccgtaaattgagtggacatcgccattccaagaatgaatagcggcagcacgagcatccagatcggcatggcgggagattgaaacgaaaactgggcaatcatcagaccgataaataccgtaatgccgaccagagtcttccggtatcccaaacgtcgtaaaacctgcgttacggtcgatttcgcgataatagaacccaaagccgtcggcgccatcatgcagccggcgatcagagccgggtagccaaaaccaacctgtagcattaacggcatcaaaaaaggtacgcagcctgtccccagacgcgtggcgaggttgccggcaataccgacggaaaatgtgcgtgtcttaaacagcgatagtgatattaacggtgtcggatgacggcgggcgtggcggatataggccaatagtagaacgatactgcaaaaaataatggcggatgcgatccatgtcgccacaatcttttcgccaaacagttccattccgctggaaaataaaaccagacttaacccaaaaagaaagaagccggtcatgtcaaacttgcgacgcggcgtggtgaagttgggcatatatttgcgggcatacagaatgcctgcaacaccaatgggaatattaatcaggaagatccagtgccagcttgcccaggtcaccagtacgccgcctaataccggccccagaatcggacctaccagccccggcatagtgacaaagttaagaacgggcagcagctcactacgcggataggctcgcaataacgccagccgcgccactggcatcatcatcgctccgccgacgccttgtacgacgcgaaaaataaccaattcagatagtgaactggagagcgcgcaggccagcgagcctaacgtaaacagacttacggcaaccataaaaacgcgacgcgtaccaaagcggtcagccagccagccgcttaccggaattaacatagctactgtcagggtataactgataatagcggactgcatggcgagtggtgaacggttaagactatgcgcaatagccggtaaagcggtattcaaaatggtggcgtctagcgcctgcataaagaaggccatcgccgcgatccacggcaggccagccatactgcgcgcttttttgctggtcattcaatatcctgttaattatctggtctctcattgggcgctattaacaacgcctggcaggcctggaaagcgcgttcgccgtcgccatcagcgatggcatcaacaatggcctggtgcaaatccagctttaccacctcgttataggtgattgaggtaaagtaagtgtgataaaccgaatgaaatagcgtcgcaaaagagattagaaagggattggcgctcatttcgtagatatgctcgtgccacgccatatccacttcaatccagcgttcacgcttaaaatgctttttcagcgcgaccatctcttccattaaggcattaagccgcgctttctgctccggtgtgccaagagtcgccgccagcaggcaggcttgcggctccaggctaatacgcatcaccagaaaatgctctaccacctgatgaaaattttcttccgtcatccaccaggtcagcagctcttgatccagaaagttccagtttccctgcggcatcacccgcgtaccaatgcgcggacgaggtagcaccatacctttagccgtcaacgttttcaccgcttcgcgaactgccgttcgacttacgccgtactgctcgcccagttctatttcgccgggaagaatcgtaccgggggcgtagtcaccctttaatatccgctgcgccagcttttcagccagaacataggatagatttttctgtgcggctaattgttgtgcgcttaaaggcatgaatgttcttcctttctctttcgtttggttattagtatgccacctggaagtgtgattgcagttgcaataacggcaatttgcttattttatggcacgttaagcacgctattgatgaaaaaagagacactcagaaaattattttaaatttcctcttgtcaggcagaaataactccctataatgcgccaccactgacacggaacaacggcacacaggccgccgggtcagcggggttcagaccagaacctcacggagaaaagcgaaaataaacgcttgactctgaagcgggaaagcgtaatatgcacaccccgcgccgctgagaaaaagcgaagcggcactgctctttaacaatttatcagacaatctgtgtgggcactcgaagatacggattcttaacgtcctaggacgaaaaatgaataccaagtctcaagagtgaacacgtaattcattacgaagtttaattcattgagcatcaaacttttaaattgaagagtttgatcatggctcagattgaacgctggcggcaggcctaacacatgcaagtcgaacggtaacaggaagcagcttgctgcttcgctgacgagtggcggacgggtgagtaatgtctgggaaactgcctgatggagggggataactactggaaacggtggctaataccgcataacgtcgcaagaccaaagagggggaccttcgggcctcttgccatcagatgtgcccagatgggattagcttgttggtgaggtaacggctcaccaaggcgacgatccctagctggtctgagaggatgaccagccacactggaactgagacacggtccagactcctacgggaggcagcagtggggaatattgcacaatgggcgcaagcctgatgcagccatgccgcgtgtatgaagaaggccttcgggttgtaaagtactttcagcggggaggaaggtgttgtggttaataaccgcagcaattgacgttacccgcagaagaagcaccggctaactccgtgccagcagccgcggtaatacggagggtgcaagcgttaatcggaattactgggcgtaaagcgcacgcaggcggtctgtcaagtcggatgtgaaatccccgggctcaacctgggaactgcattcgaaactggcaggcttgagtcttgtagaggggggtagaattccaggtgtagcggtgaaatgcgtagagatctggaggaataccggtggcgaaggcggccccctggacaaagactgacgctcaggtgcgaaagcgtggggagcaaacaggattagataccctggtagtccacgccgtaaacgatgtctacttggaggttgtgcccttgaggcgtggcttccggagctaacgcgttaagtagaccgcctggggagtacggccgcaaggttaaaactcaaatgaattgacgggggcccgcacaagcggtggagcatgtggtttaattcgatgcaacgcgaagaaccttacctggtcttgacatccacagaagaatccagagatggatttgtgccttcgggaactgtgagacaggtgctgcatggctgtcgtcagctcgtgttgtgaaatgttgggttaagtcccgcaacgagcgcaacccttatcctttgttgccagcgattaggtcgggaactcaaaggagactgccagtgataaactggaggaaggtggggatgacgtcaagtcatcatggcccttacgaccagggctacacacgtgctacaatggcgcatacaaagagaagcgacctcgcgagagcaagcggacctcataaagtgcgtcgtagtccggattggagtctgcaactcgactccatgaagtcggaatcgctagtaatcgtggatcagaatgccacggtgaatacgttcccgggccttgtacacaccgcccgtcacaccatgggagtgggttgcaaaagaagtaggtagcttaaccttcgggagggcgcttaccactttgtgattcatgactggggtgaagtcgtaacaaggtaaccgtaggggaacctgcggttggatcacctccttaccttaaagaactgttctttgcagtgctcacacagattgtctgatgaaaagtaaatagcaaggcgtcttgcgaagcagactgatacgtccccttcgtctagaggcccaggacaccgccctttcacggcggtaacaggggttcgaatcccctaggggacgccacttgctggtttgtgagtgaaagtcacctgccttaatatctcaaaactgacttacgagtcacgtttgagatatttgctctttaaaaatctggatcaagctgaaaattgaaacacagaacaacgaaagttgttcgtgagtctctcaaattttcgcaacacgacgatgaatcgaaagaaacatcttcgggttgtgaggttaagcgactaagcgtacacggtggatgccctggcagtcagaggcgatgaagggcgtgctaatctgcgataagcgccggtaaggtgatatgaaccgttataaccggcgatacccgaatggggaaacccagtgtgattcgtcacactatcattaactgaatccataggttaatgaggcgaaccgggggaactgaaacatctaagtaccccgaggaaaagaaatcaaccgagattcccccagtagcggcgagcgaacggggaggagcccagagcctgaatcagcatgtgtgttagtggaagcgtctggaaaggcgcgcgatacagggtgacagccccgtacacaaaagcgcatgtgctgtgagctcgatgagtagggcgggacacgtggtatcctgtctgaatatggggggaccatcctccaaggctaaatactcctgactgaccgatagtgaaccagtaccgtgagggaaaggcgaaaagaaccccggcgaggggagtgaaaaagaacctgaaaccgtgtacgtacaagcagtgggagcacccttcggggtgtgactgcgtaccttttgtataatgggtcagcgacttatattctgtagcaaggttaaccgtataggggagccggagggaaaccgagtcttaaccgggcgttaagttgcagggtatagacccgaaacccggtgatctagccatgggcaggttgaaggttgggtaacactaactggaggaccgaaccgactaatgttgaaaaattagcggatgacctgtggctgggggtgaaaggccaatcaaaccgggagatagctggttctccccgaaagctatttaggtagcgcctcgtgaattcatctccgggggtagagcactgtttcggctagggggccatcccggcttaccaacccgatgcaaactgcgaataccggagaatgttatcacgggagacacacggcgggtgctaacgtccgtcgtgaagagggaaacaacccagaccgccagctaaggtcccaaagtcatggttaagtgggaaacgatgtgggaaggcccagacagccaggatgttggcttagaagcagccatcatttaaagaaagcgtaatagctcactggtcgagtcggcctgcgcggaagatgtaacggggctaaaccatgcaccgaagctgcggcagcgaacgtatcacccaagacaactttacggagttgacgattgacggagcgaagcgacgtcaaagcgttcattaaagtcgagttggcttagggatacgttcgttgggtaggggagcgttctgtaagcctgtgaaggtgtgtcgtgaggcatgctggaggtatcagaagtgcgaatgctgacataagtaacgataaagcgggtgaaaagcccgctcgccggaagaccaagggttcctgtccaacgttaatcggggcagggtgagtcgacccctaaggcgaggccgaaaggcgtagtcgatgggaaacgggttaatattcccgtacttggtgttactgcgaaggggggacggagaaggctatgttggccgggcgacggttgtcccggtttaagcgtgtaggtgtgtgttccaggtaaatccggttcactttaacactgaggcgtgacgacgaggcactacggtgctgaagcaacaaatgccctgcttccaggaaaagcctctaagcatcaggtaacatcaaatcgtaccccaaaccgacacaggtggtcaggtagagaataccaaggcgcttgagagaactcgggtgaaggaactaggcaaaatggtgccgtaacttcgggagaaggcacgctgacacgtaggtgaagtgatttactcatggagctgaagtcagtcgaagataccagctggctgcaactgtttattaaaaacacagcactgtgcaaacacgaaagtggacgtatacggtgtgacgcctgcccggtgccggaaggttaattgatggggtcagcgcaagcgaagctcctgatcgaagccccggtaaacggcggccgtaactataacggtcctaaggtagcgaaattccttgtcgggtaagttccgacctgcacgaatggcgtaatgatggccaggctgtctccacccgagactcagtgaaattgaactcgctgtgaagatgcagtgtacccgcggcaagacggaaagaccccgtgaacctttactatagcttgacactgaacattgagccttgatgtgtaggataggtgggaggctttgaagtgtggacgccagtctgcatggagccgaccttgaaataccaccctttaatgtttgatgttctaacgtggacccgttacccgggttgcggacagtgtctggtgggtagtttgactggggcggtctcctcctaaagagtaacggaggagcacgaaggttggctaatcctggtcggacatcaggaggttagtgcaatggcataagccagcttgactgcgagcgtgacggcgcgagcaggtgcgaaagcaggtcatagtgatccggtggttctgaatggaagggccatcgctcaacggataaaaggtactccggggataacaggctgataccgcccaagagttcatatcgacggcggtgtttggcacctcgatgtcggctcatcacatcctggggctgaagtaggtcccaagggtatggctgttcgccatttaaagtggtacgcgagctgggtttagaacgtcgtgagacagttcggtccctatctgccgtgggcgctggagaactgaggggggctgctcctagtacgagaggaccggagtggacgcatcactggtgttcgggttgtcatgccaatggcactgcccggtagctaaatgcggaagagataagtgctgaaagcatctaagcacgaaacttgccccgagatgagttctccctgagacttagagtctcctgaaggaacgttgaagacgacgacgttgataggccgggtgtgtaagcgcagcgatgcgttgagctaaccggtactaatgaaccgtgaggcttaaccttacaacgccgaagatgttttggcggttaagagaagattttcagcactgattcagattacatcagaacgtaaaaacggtctgataacagaatttgcctggcggcactagcgcggtggtcccacctgaccccatgccgaactcagaagtgaaacgccgtagcgccgatggtagtgtggggtctccccatgcgagagtagggaactgccaggcatcaaattaagcagtaaactgatgtaaaaatcagtggttgtaaaagaattcggtggagcggtagttcagttggttagaatacctgcctgtcacgcagggggtcgcgggttcgagtcccgtccgttccgccaccctaattaggggcgtagttcaattggtagagcaccggtctccaaaaccgggtgttgggagttcgagtctctccgcccctgccagaaataatccttagcatctgctaaggatttttttttgcctaaaattacctgattatctgatcaggtaatcgtaagttcccttctttttcttttcatcattttcattgttcatccagcacatccgtttttaacagatcgcagatcagcgagtatttatcgctgttttgcagccaaatagcgtatagtggccgtgaaagcgttgcgctgtcggcaacggtatgtaatccgcccttttcatttgcccagtttacaggaagccagctacagccatttaatgcgctaagctgctgtcgggcgagttcggctgagctggttgttaataccggcacttcatctgctgcgatcagccctgtttcatgctgttggaagtctggtccccactccagccgcagataattgagttctgatttcttacgggcagggctgctgcaatataacgccaaagtgaagtgccctaacagctgactgctgaactcatccattttgggcgcttcggtagtaatgaggagatcaagctggcgttcatgaagttgcttcacaagcgattgccgttgagcgattctggcttcgaactgcaggccgctttgcggctcctgtagttggtacagtcgccccagccaggcgttaagcatacactcccataaagacgcgctggcgccgatggaaaactcgttatggcgtgaggtatgcgccacctctttacgtgccgcctgccacgtattcatcagcgtttccgcatacggtaaaagtttttcgccagccgtggttaaacggatattgtttctgtgccgcgtaaaaaggtttacgcccagttgattctccagttgcctgatacgaaagctcaccgcggattgcgtcaggtaaagtgcttctgcggcccgcccgaaatggcgtgtccggctaacttccaggaaagtttttaacaattccgtatccactgtgctctccacaaaattatttgtcgttatgatttaaatgttttgttttacactctgtcaagcgtaactaatactccgcgccataaatagctcagacaaagaattaggagcgtgcaggatggcggaaagctttacgacgactaatcgatattttgacaataaacattatccacgtggattctctcgtcacggtgatttcacgattaaagaggcacaactgcttgagcgtcatggtcatgcctttaatgatctggatcttggcaagcgtgagcctgtgactgaagaagagaagctgtttgtagcggtatgtcgcggtgaacgcgagccggtaacggatgcagaacgcgtctggtccaagtatatgacgcgtatcaagcgtccaaaacgcttccacaccttgtctggcggcaagccgcaagttgaaggcgcagaagactacaccgaagctgatgattaataaaaagggcgtaatgccctttttttacgccaacagcttttgcaaatgaattaacaacctgtctatcgcccgatagcttaccgcctcctgcaaatgctgacgcgagatctggtcagccagttctatgtcggcaatggttctggcaacttttagtaaacgctgccaggcgcgaatggataatccaagatgcaccagcgtgtcttcaagccagcgggcgtcatcgtgatgcaaaacacaatatttttggatttcgcgaccctccagacgcgcgtttaacttcttctggcgtcggtactgccgttcatgggcggcgatgacccgcttttttaccgtagcgctgctctcaccctttgaggcgtgttggctaagaatcccgggcggtggaagcggtatctcaagcgaaaggtcaaaacgatcaagaaacgggcctgacaaccgattaaggtaacgtagtgtctgttctggcgtgcagcgattatggtttccctgataatgtccggtcgggctgggattcattgcggcgattaactggaacctggcagggtacgttattttcgctctggtacgggataaatgaatttgaccggattctataggttcacgtagcgcatccagtgtgcgtcgttcaaattcaggcaattcatcaaggaacaaaattccgttgtgcgccagcgatatctctcccggggcgggtattgcgccgccgccgaccatagcagtaagtgaggcgctatgatgaggtgagcgaaaggggcgttgctgccatcgtttttgtaccgtatcggcattaaccagactgaggatcgcggcgctttccaacgcctcctcattgcttaatggtggaagaatcccgctcagtcgactggccagcatggttttacccgtacccggcgggccgatcaatagcagattatgtccccctgccgctgtaatctccaggccgcgtttaccctgctcctgaccgatcacatcgcgaagatcggcagttgcggtaggcgatgccatatcctgagctaaaggtctttccagggcgtgtttcccttccagaaaggcgcagacggtttgtagatgatcggcgataaaacatccttctttgcttataagcccaacctccgccgcgttctctgttgcgacgataatatttctgccggccctgatggcttccgttgcacttgatattgcgccaggaacgccgcgtaatgcgcctgtaagcgctaactcacccaccagctcatatgcctcaagattcgacgctgtaagctgctcagacgcggccagaagcgcaacagcaataggcaggtcataccttccaccctctttcggtagatcggctggagcaaggttaatggttatttttttagccggaaattcatatccgctattaataatcgcactacgtacccggtcacgcgcctcttttaccgtggtttccggtaggccaaccatggttaatcccggtaatccattactgatatgcacctctatagtgataggcggcgcattgacgccaagtgcggcgcgggtatgaacaatcgccagtgacataatccctcctgttacgtggattatgcggaatagaagagaaaatcgaattactgactttttgttttttagcgactgcttcctgaattttggcgtcattttcaggtaagaaacatcaaactggaagaacgctcgcagaagcgaaaagaaggaaaacaggatgtagagtgcgccaaaagggggaggaaaacgtgaaaatttttcagttgctaatttttcttataaaaaacaaagtacttttaggcattcacctgcattatctgaaacgtggttaaaaaaatatcttgtgctattggcaaaacctatggtaactctttaggtattccttcgaacaagatgcaagaatagacaaaaatgacagcccttctacgagtgattagcctggtcgtgattagcgtggtggtgattattatcccaccgtgcggggctgcacttggacgaggaaaggcttagaaatcaagccttaacgaactaagacccccgcaccgaaaggtccgggggttttttttggcctgaaaaacttaagcgaggagcagagcgtgaataacagcataaaattctgtttctcaagatttacgacggggatgtaactatgaacggggcacagtgggtggtacatgctttgcgagcgcagggggtgaaaaccgtatttggttatcctggcggcgcaattatgccggtttacgacgcgttgtatgacggtggtgtggagcatttgttgtgccgacacgagcagggtgcggcaatggcggcaatcggttatgcccgttctaccggcaaaaccggtgtttgtatcgccacttccggccctggcgccactaacctgatcactggcctggcggatgcgttgttagattcggtccccgtcgtcgcgatcacgggtcaggtttccgccccgttcatcggcaccgatgcgttccaggaggtggatgtgttagggctgtcgctggcctgtaccaaacacagcttcctggtgcagtcgctggaagagttgccgcgcatcatggcggaggcttttgaagtcgccaacgctggccgtcctggcccggttctggtggatatcccgaaagatatccagttggccagcggtgagctggaaccctggtttactaccgttgctaacgaagcgactttcccgcaggctgatgtggaacaggcgcgccagatgctggaacaggcgaaaaaacccatgctgtacgtcggcggtggtgttggtatggcgcaggcagttccggcgctgcgtaaatttatcgcggtaacgcaaatgccagttacctgcacgctgaaagggctgggggctgttgaagctgattatccgtactatctgggcatgctgggaatgcacggtactaaagcggctaatttcgcggtgcaagagtgtgatttactgatcgcagtgggtgcacgttttgatgaccgggtgaccggtaagctgaatacgtttgcgccgaacgccagcgtaatccatatggatatcgacccggcggaaatgaacaaactgcgtcaggcacacgtcgcgttgcagggcgatttaaattcgctgttgccggcattacagcaaccgctgaagatcgacgcatggcgtcagtcctgtgcagagctgcgcgcagaacacgcctggcgctatgaccatcctggcgagactatctatgcgccgttgttgttgaagcaattgtcggaacgcaaacccgcagacagcgtggtgacgacggatgtggggcagcatcagatgtggtcagcccagcatatgacttacacccgcccggagaacttcatcacctccagcggtctggggacgatgggattcggcttaccggcggccgttggcgcgcaggtagcgcgaccgaatgataccgttatctgtatctccggtgacggctccttcatgatgaatgttcaggagttgggcaccgtaaaacgcaagcagttaccgttgaagatagtcttactcgacaaccagcggttagggatggttcgacaatggcagcaactgtttttccaggagcgatatagcgaaaccaccctgaccgataaccccgatttcctcatgctggccagcgccttcggcattccaggccagcacattactcgtaaagaccaggttgaagcggcactcgacacgatgttggcaagcgaagggccgtacctgcttcacgtctcaatcgacgaacttgaaaatgtctggccgttggtgccgcctggcgccagtaactctgaaatgctggagaaattatcatgatgcaacatcaggtcaatgtatcggcacgctttaatccagaaaccttagaacgtgttttacgcgtggtgcgccatcgtggttttcaggtgtgctccatgaatatggaagccgcgaccgatgcgcagaatataaatattgaattgaccgttgccagtccccggtcggtcgacttactgtttagtcagttaagtaaactggtagatgttgcgcatgtcgcgatctgccagagcgctgccacatcacaacaaatccgcgcctgagcgcaaaaggaagaaaaatgacgacgaaaaaagctgattatatttggttcaatggcgagatggtgcgctgggaagacgcgaaggttcacgtaatgtctcacgcgctgcactacggtacgtcggtatttgaagggattcggtgctacgactctcacaaaggtccggtagtgtttcgtcatcgtgaacatatgcagcgcctgcgcgactcagcaaaaatttatcgttttccggtttcccagagcattgatgagctgatggaagcctgccgcgacgtaattcgtaaaaataatctgaccagcgcctatatccgtccgttggtatttgtcggcgatgtcggtatgggcgttaacccgcccccgggatacaccactgacgtcatcatcgccgcgttcccgtggggggcatacctgggcgccgaagcgctggatcaggggatcgatgcgatggtttcttcctggaaccgcgctgcgccgaacaccattccgaccgccgccaaagcgggcgggaactatctttcctcactgctggtgggtagcgaagcgcgccgccacggctatcaggaaggcatcgccctggatgtaaacggctatatctccgaaggcgcaggtgaaaacctgtttgaggtaaaagatggcgtgctgtttactccgccgtttacctcttccgcgctgccaggcattactcgcgacgcgattatcaaactggcgaaagagctgggtattgaagtgcgcgagcaggtgctgtcccgtgaatcgctgtatctggccgacgaagtgtttatgtccggaaccgcggcagaaattactccggtacgcagcgttgatggtatccaggtaggtgaaggccgttgcggccctgttaccaagcgtattcaacaagccttctttggtctcttcactggagaaaccgaggataaatggggctggttggatccggtaaattcataataaataaaattaatattttcccaaaataatttgcgtcacaggaaggcggtaacgcagcgaatccccagaagcttactgtagtaagtgactggggtgagtgaggcagccaacgcacctgtggcgtgaagtatgaagggaaaagatggggagtaaataaagcatgcctaagtaccgttccgccaccaccactcatggtcgtaatatggcgggtgcccgcgcgctgtggcgcgccaccggaatgaccgacagtgattttggcaaaccgattatcgccgtggtgaactcattcactcagtttgtgccgggtcacgttcatctgcgcgatctcggtaagctggtcgccgaacagattgaagcttccggcggggtggcgaaagagttcaacactattgccgtggatgacgggattgccatggggcacgggggtatgctctattcactgccgtcgcgcgagctgatcgccgactccgttgagtacatggtgaacgctcactgcgctgacgcgatggtgtgtatctccaactgcgacaaaatcaccccagggatgctcatggcctcgctgcgcctgaatattccggtgatctttgtctccggcggcccgatggaagccgggaaaaccaagctttcagacaaaattatcaagctggatctggttgatgccatgattcagggagcggacccgaaagtctctgacgatcaaagtaaccaggttgaacgctccgcctgtccaacctgcggctcctgctccggcatgtttaccgctaactccatgaactgcctgaccgaagcgctgggcctgtcgcagccgggcaacggctcgctgctggcaactcacgctgaccgtaagcagttgttcctcaatgccggtaagcggattgttgaactgactaaacgctattacgagcaaaacgacgaaagtgcactgccgcgtaacatcgccagcaaagccgcgtttgaaaacgcgatgacgctggatatcgcgatgggcggttcgaccaacaccgttcttcacctgctggcggcggcgcaggaagcggaaatcgacttcaccatgagtgatatcgacaagctgtcccgcaaggtgccgcagctgtgtaaagtggcgccaagtacccagaaataccatatggaagatgttcaccgtgccggcggtgtgctgggtattttaggcgagctggatcgcgccgggctgctgaaccgcaacgtgaaaaacgtattaggcctgacgttgccgcaaacgctggaacagtacgacatcacggttacgcaggacgaagcggttaaaaaaatgttccgtgctggccctgccggtatccgtactacccaggcgttctcgcaggattgtcgctgggattcgctggatgacgaccgcgcagcgggttgcatccgctcgctggaatatgcctatagcaaagacggcggtctggcggtgctgtatggcaacttcgccgaaaacggctgcattgtgaaaaccgcaggcgtggatgacagcatccttaaatttaccggcccggctaaagtgtatgaaagccaggacgacgcggtagaggcgattctcggcggcaaagtagtggaaggcgatgtagtcgtgatccgctacgaagggccgaaaggcgggccgggaatgcaggaaatgctctatccgaccagtttcctgaagtcgatggggctgggcaaagcctgcgcgctcatcaccgatgggcgtttctccggcggtacttcgggtctttccatcggccacgtctcgccggaagcggccagcggcggcactattgcgttgattgaagatggcgacactattgcgattgatatcccgaaccgcagcattcagttgcagttgagtgaggctgaaatcgccgcacgccgcgaggcgcaggaagctcgtggcgacaaagcctggacgccgaaaaatcgtcagcgtcaggtttcgtttgccctgcgtgcctacgccagcctggcgaccagcgccgataaaggcgcggtgcgcgataaatcgaaattgggaggttgatgatggcggaatctcaacctctgtcagtcgcgccggaaggggcggagtatctgcgcgcggtgctacgcgcgccagtatacgaagcggcgcaggtgacaccgctgcaaaaaatggaaaagctctcgtcacgtctggacaacgttattctcgtcaaacgcgaagaccggcagccggtacatagctttaagctgcgcggcgcttacgcgatgatggccggattgaccgaagaacaaaaagcccacggcgtgattaccgcgtcggcggggaaccatgcacagggcgtggcgttttcctccgcgcggcttggcgtgaagtcgctgatcgtcatgccaaaagcaacggcggatattaaagtcgatgcggtacgcggttttggcggcgaagtgctgttgcacggcgctaattttgatgaagcgaaagcgaaagctattgaactggcgcagcagcagggttttacttgggtgccgccgtttgatcacccaatggtgatcgccgggcagggcacgctggcgctggaactgcttcagcaggattcgcatctcgatcgtgtctttgtgccggttggcggcggcggcctggcggcgggcgtagcggtactgatcaaacaattgatgccgcaaatcaaagtgattgccgtcgaagcggaggattccgcctgcctgaaagcggcgttggaagccggtcatccagtggatctcccgcgcgttgggttgtttgctgaaggcgtagcggtaaaacgcatcggcgacgaaaccttccgcctgtgccaggaatatctcgacgacattattacagtcgatagcgacgctatctgcgcggcgatgaaagatctgtttgaagatgtgcgtgcggtggcggagccgtccggcgcgctggcgctggcggggatgaagaaatatatcgcccagcacaatattcgcggcgaacgcctggcgcacgtcctttccggcgccaacgtcaacttccacggcttgcgctatgtgtctgaacgctgcgagctgggggaacagcgcgaagcgttactggcggtgaccattccggaagaaaaggggagctttctcaaattctgccagttgcttggcgggcgtatggtcaccgaatttaactaccgttttgccgacgcgaaaaatgcctgtatttttgtcggcgtacgcgtcagtcaggggctggaggagcgaaaagagattatcacccaactgtgcgacggcggttatagcgtagtggatctctccgacgatgaaatggcgaagctgcatgtgcgctatatggtcggcggacgcccctccaagccattacaggagcgtttgtatagtttcgaatttccggagtcgcccggcgcgttgctcaaattcctgcatacgcttggcacgcactggaatatttcgctattccattaccgtagccacggtaccgattatggccgcgtgctggcggcgttcgagttaggcgatcatgagccggatttcgaaacccggctgcatgagctgggctatgaatgccatgatgagagcaataacccggcgttccggttctttctggcgggttaattcagcgtttagtttttcgggcccacaaagtaaagtgggcctgatatccagatattatcttccctcagttattgggcttttctgccagcccggagcatccactcatttcattttgcgagacgttttccagaaggcgcccaatctgcttgtggtgaaactcggctcaccatatcgttagcaccgccatcacttgcacctgctaaaaacaatgtataaaattttatacacaaaggatgttatgttactcactcgagctctctccaatgaaaaagaaattcgatgagtgggatcttctctggaggatctcctggcttttcccataacggtacgtaaagcagtcggttatcagcttcacaaaattcagtatggaattgaacccgatgactggaaaccgttttcagaaattggggctggggtaaatgaaattcgtattcgtgacaacaatggtatctatcgcgttatgtatgtcgctaagtttgaagaagcactctacgttttgcatagtttccaaaaacagacgcaacaaaccagtcagcatgataaaaacatcgccagaacgcgttataaccgggtggtgcaacaacggagaaacagcttgtgattgccaaaactgatagtgatattcgccatgtgacgccatctggcggtaatgtttttgctgatttggggtttcataagcaggacgcagaaaagttttacgctgattccctgaatgaaatcgaaaacacgttagccattaaacaacagctaatggaagaaattaccctctggattacgcaaaaccagatgaagcaagccgaggttgctacagttttgcatatatcccgaccgcgcgtttcggatgtcgtcaacaagaaatgcagcaaattcaccattgatgctctggtgaatatgcttagccgtattgggaagcctgttcgggtaatggtagggccgtaaaactaattcggtaaaatcttccagaacgcatcaattagcggctcatgcagccgctttttttgcgcgcagacgccgagttcaaacggcgttttttcatcgctgcgttctaaaatcatcacccggttgcgcactggctccgggctgttttccagcaccacttccggcagcagcgccacgccgcagcccagcgccaccattgagaccatcgcttcgtgaccgccgacggtggcgtaaatctgcggattgctgattttatgccggcggaaccatagctcaatgcgacggcgtaccggcccctggtcggccatgataaacggcaccgtcgaccagtctggcttgtcgaccgaaacctgattacgcaccgggcagggcagcgccggggcgatcagcaccaccgccagattttccagcatcgaaaacgccactgcgccgggcagcgtttctggtttgccggcgattgccagatcggcctcgccggtgactactttttccatcgcatcggcggcgtcgccggtggtgagcttaatttccaccgagggatgctcggcgcgaaaacggtcgaggattggcggcaggtggctgtatgccgcggtcactgaacagaagatatggagttcgccggaaagggacggcccctgctgatcgagggtatggcgcagctgctggtactgcaaaagcgtctgttgggcaaacactcgcagctcttcacccgcttcggtcagcgtgaccgtacggttatcgcgcacaaacagcggctggccgagatcttcttccagccgctgaatctgccgggagagcgtggaggggctgacgtgcatcgcccgcgcgctgcggccaaagtggcggctttccgccagatgcaagaaggtttttagatcgcgtaaatccacagacagacctccggtttttgacgttgcataaaccgcaacataacgttgtgaatatatcaatttccgcaataaatttcctgttgtaatgtgggttcattcgcacagatagcaatctgtaaaccgaacaataagcgcgacacacaacatcacggagtacaccatcatggctaactactttaatacactgaatctgcgccagcagctggcgcagttgggtaaatgccgctttatgggccgcgacgaattcgccgacggcgcgagctaccttcagggtaaaaaagtggtcatcgtcggctgtggcgctcagggtctgaaccagggcctgaacatgcgtgactccggtctggatatttcctacgccctgcgtaaagaagccattgctgagaagcgtgcttcctggcgtaaagcgaccgagaacggcttcaaagtaggcacctacgaagagctgatcccgcaggctgacctggtagttaacctgacgccggacaaacagcactccgacgtggtgcgttccgtacagccgctgatgaaagacggcgcggcgctgggctactcccacggcttcaacatcgtggaagtgggcgagcagatccgtaaagacatcaccgtggtgatggtggcgccgaagtgtccgggcaccgaagtacgtgaagaatacaagcgtggcttcggtgtgccgacgctgatcgccgttcacccggaaaacgatccgcaaggcgaaggcatggcgattgctaaagcctgggcggcggcgaccggcggtcaccgtgcgggcgtactggagtcttctttcgtggcggaagtgaaatccgacctgatgggcgagcagaccatcctgtgcggtatgctgcaggccggttctctgctgtgtttcgacaagctggtggcagaaggcaccgacccggcttatgcggaaaaactgattcagttcggctgggaaaccatcaccgaagcgctgaagcagggcggcatcaccctgatgatggaccgtctgtctaacccggcgaaactgcgtgcttacgcgctgtccgaacagctgaaagagatcatggcgccgctgttccagaaacacatggatgacatcatctccggcgaattctcttccggcatgatggctgactgggctaacgacgataagaaactgctgacctggcgtgaagagaccggcaaaaccgcgttcgaaaccgcgccgcagtatgaaggcaaaatcggcgagcaggagtactttgataaaggcgtgctgatgatcgcgatggtgaaagcgggcgttgagttggcgttcgaaactatggtggattccggcatcatcgaagaatccgcttactacgaatcactgcacgagctgccgctgatcgccaacaccatcgcccgtaagcgtctgtacgaaatgaacgtggttatctctgataccgcagaatacggtaactacctgttctcttacgcttgcgtaccgctgctgaaaccgtttatggcggaattgcaaccgggcgatctgggtagtgctatcccggaaggcgcggtagacaacgcacagcttcgcgacgtgaacgacgcgattcgtagtcatgcgattgagcaggtaggtaagaaactgcgcggctatatgacggatatgaagcgtattgcggtagcgggttgatataccttgtcggggggcgctagcgcttacctgacctacaaaatcaagcagacgatgtaggccgggtaaggcgtagccgccacccggctttttatttacgatacaataccttaatgatgtggtaaccgaactgggtatgcagcgggccggttggctccagtaccgggcaggaaaagactactttatcgaatgccggaaccatctggccctgacgaaattcgcctaaatgaccgccttttttaccggatgggcagatagaatgcttcttcgccagcttctcaaaatcgccgccgtttttaatttgctccagaagatctaaagccagtttctcttcttttacaagaatatgcagtgctgctgccatttttgccattattgtgttctcacgtcgcaaagattggccgtcactttatcactccttaggccgtcagacatatactcttcgccattacaggacagatgtcccgcctgatttaatgaaccgggagataagcagcatttttagcgggcgtatttcggatgtgcgggacggcggtcctgtcctttctgacaaggggcgagataccatgaacataatgaaaaacgcagaatttccagacgactggcttttagggctacgccaggtcgtacgcgacccagtgctctatgaattactcaaatactgcccgttggaaatcatgcagtacagggcgtttatgcgatgtcgcttgagtatgttctgctgacggcgatcgcgctaatgggttctttcagttggatcaagagcgcacagcgtaatggctatatgccgcttgccgccagagcctgctgattgaccttttccaggctgcctgaaaaagcagcctggtcttctctgggcctcgctttctgctacaatccctcccccgttcgaagattgagcactattcccatgcgtttaaatcccggccaacaacacgctgtcgaattcgtcaccggaccctgcctggtgctggcaggagcgggttctggtaaaactcgcgtaattaccaataaaatcgcccacctgatccgcggatgcggctatcaggcccggcatattgcggcggtgacgtttaccaacaaggcagcgcgtgagatgaaagaacgggttgggcagacgctcggccgtaaggaagcgcgcggtttgatgatctccacctttcatacgctagggctggatattattaagcgcgagtacgctgcgctggggatgaaatcgaacttttcattgtttgacgataccgaccaggtcgccttgctcaaagagctgaccgaaggcctgatcgaagacgacaaggttctgttgcaacagctgatctccacgatctccaactggaaaaacgatctcaaaacgcctgcgcaggcggcggccggggcgaaaggcgaacgcgatcgtatttttgcccactgctacgggctttacgacgcccatatgaaggcatgtaacgttctcgattttgatgatttgattttgctgccgacgctgctgctgcaacgcaatgacgaggtgcgcgagcgctggcagaataaaattcgttatctgctggtggatgaatatcaggatactaacaccagccagtatgagttggttaagctgctggtcgggcaacgcgcgcgctttacggtcgtaggcgatgacgatcagtctatctactcctggcgcggggcgcgtccgcaaaacctggtgttactgagccaggattttccggcgctgcaggtgattaagctggagcaaaactatcgttcttcgggccgcatcctgaaagcggcgaatattctcatcgccaacaatccgcacgtctttgaaaagcgcctcttttccgagctcggttacggcgcggaactcaaagtgttaagcgcaaacaatgaagagcatgaagctgagcgcgttaccggcgaactgattgcccatcactttgtgaacaagacccagtacaaggattacgccattctgtatcgcgggaatcatcagtcgcgggtatttgaaaaattcctcatgcagaaccgcattccgtacaaaatttccggcggcacctcatttttctcccgtccggagattaaagacctgctggcctacctgcgggtgttgaccaacccggatgatgacagcgctttcctgcgcatcgtgaatacgccaaaacgcgaaatcggtccggccacgctgcaaaagctgggtgaatgggcaatgacgcgtaataaaagcctgtttaccgccagctttgatatgggacttagccaaaagctgaccggacgtggttacgattcattgacgcgttttacccactggctgggggaaatccagcgtctggccgaacgcgagcctgtcgccgccgtgcgcgatctcatccacggtattgactatgaatcctggttgtacgaaacctcgccgagccccaaagcggcggaaatgcgtatgaaaaacgttaaccagctctttagctggatgactgagatgctggaaggcaacgaactcgatgagccgatgacgctgacccaggtggttacacgctttacactgcgcgatatgatggagcgtggcgagagcgaagaagagctggatcaggtacagttgatgacgcttcatgcatcgaaaggactggaattcccgtatgtctatatggtgggaatggaagaaggatttttgccgcatcaaagcagcattgacgaagataatattgaggaagagcgtcggctggcctatgttgggatcactcgcgcgcagaaagagctcacctttacattatgtaaagagcgccgtcagtatggggaactggtgcgcccggaacccagccgcttcctgttagaactcccgcaggatgatttaatctgggagcaggagcgcaaagtggtaagcgctgaggagcgaatgcaaaaagggcaaagtcacctggctaatctgaaagccatgatggcggcaaagcgagcgaaatcgtaggccggataagcgaagcgtcatccggcaatcaaactacggttagcgaacgtccagcggccagtgtacatagctttgccactggctttcctgatcaatcaactctttacccagcgggtgatgcgccagccagtcgccaggcaaggttaacgtcagattttcatttagcgcctgtagcgtaatttctggtaccagatcgtcacgacggcgaccagcaaaaagaatcgccaggcgcagcaaacggcatagctgttccgcaacacggggcggtaccgcgttttgctgatgaagcgaagagagatcgaccggattggtctgattcagtaagagggtggcgagcaattttttctgcgcgggcgtatagccaggcagatccaaatggcgtactaaataggcggcatgatagggcgcctgtttaaaatcaacgctcagaccgatctcatgcaactggcaagcgctaagcaacagttcacgactgataggctcaatatgccaggcattttctacctgtttgaggaagttatctgccagcttcgctacgcgatttgcctgatcggtatcgacgataaaccgacgctgaatgtttcgcagcgtgcggctgcggatatcctgatctaccgccagatgcaacatcccatacaccagcccttcgcgtaacgcgccgcctgccagcgtcatgctctggatgttcagctcggtaaatattgcgatcagaatagccagcccgcttgggaaaaccagcgcgcgctccagcgtcaggccttcgatttccagctcttccagacgcccgcactgtatcgcgcgttgttttagctgctgcagtttggcgagcgtaatgcgctcgtccatcccctgcgccatcatgatttcctgcaatgcctgtacggtgccggaggcacccacgcagaccttccagccatgaaaacgcagttcatcggcgaccggacgcagtacatcgcgcgcggctttctccgcgtcatcaaaattttcttgcgccagattacgatcgctaaaatagcgttcaagccacgttacgcagcccatcgacaggctaaacagcgacgtggtttgcgcgccagtgccggtaaccagttcagtgctggcgccgccgatatccaccaccagtcgctgatctgcgccgccggtggtatgagcgactccctgataaatcagccgcgcctcttcttcgccgctgataacctgcaccggacaaccaaggatagtctgcgctttcgcgataaattcccccgcattaacggcgagacgcaatgttgcggtggcaaccacgcggatttgcggctgcgggatatcctgcaaacgttcagcaaacagacgcaggcattgccagccgcgttccatcgcttcggccgaaaggtggttgtcgttgttcagacccgcggccagacgcaccttgcgttttattcgggtcagcgtctggatgcttcccgccgcctcgcgcacgaccagcatatgaaaactattggaaccgagatcaatggcggcatacaacgaggtggaattcatacacttcatccttcaacctgtatccgtgttggctgcgtactcttcctaagctcatcgggatttgttttcttgccgccttgatacaggctaaatgattttgtgtatggcataacttttcttaacctgaacgacgacgattacgcggagcgccagcgcggcgcggaccattgccaggacgcgaacgcgtcagacgcaacggcttgggcagatcgttcatgagcgcttccggattgtatttgctgaccggaatcgagtggccgatatagctctcaatggcgggcagattcagcgcatactcttcgcaagccaggctgatggaatgtccgctggcgccagcgcgaccggtacgaccgatacggtgaacatagtcttcacaatcgtctggcagatcgtagttaaagacgtgcgttacggcggggatatgcaacccgcgcgccgcgacatcggtcgccacaagaatatccagatcgccgcgggtgaactcatccagaatccgcaggcgctttttctgcgcgacgtcgccggtcagcagaccaacacgatggccatctgccgccagatgtccccagatatcttcgcaacgatgcttggtgttggcgaaaataatggcgcgatccggccactcttcttcgatcagcgtttgcagtaaacgcattttctcttcattagaggggtagaaaagctcttctttaatgcggtggccggtcttttgctccggttccacttcaacatattcggcgttgttcatctgttcaaacgccagctcgcgaacccgataagacagggtggcggagaacaacatgttcagacgctgcgcagccggcggcatacgacggaacagccagcggatatctttaataaagcccaaatcgtacatgcgatcggcttcatcgagtacgacgacctgaatggcgccgaggttaatgtgattttgtttggcgtagtcgatcagtcggcccgtcgtaccaataagaatatcaacgccgctttccagcactttaagctgcttgtcgtaaccatcgccgccgtaagccaggcctaattttaagcctgtcgcttgcgccaacggctccgcgtctgcgtgaatttgtacggctaattcacgcgtcggcgccatgatcagcgcgcgcggctggttcaccttgcgatcgtcgatcgcgggatgagaaagtaaataatgaaacgttgacgtcagaaacgccatcgttttcccggtaccggtttgcgcctgccctgcaacgtcacgacccgccagcgttagcggaagggccagtgcctgaatgggcgtacaattataaaacccttttttttcaagggcttcaaccacctgtgggtgcagggcgaagtcggaaaacttctgttctgttaaatgtgttttgctcatagtgtggtagaatatcagcttactattgctttacgaaagcgtatccggtgaaataaagtcaacctttgttggcgaagttaacatcagcacctcgttggttaatgctacaccaacacgccaggcttattcctgtggagttatatatgagcgataaaattattcacctgactgacgacagttttgacacggatgtactcaaagcggacggggctatcctcgttgatttctgggcagagtggtgcgggccgtgtaaaatgatcgctccgattctggatgaaatcgctgacgaatatcagggcaaattgaccgttgccaaactgaacattgaccagaacccaggtactgcgcctaaatatggcatccgcggtattccgactctgctgctgtttaaaaacggcgaagtggcggcaaccaaagtaggcgcactgtctaaaggtcagttgaaagagtttctcgacgccaatctggcgtaataccttttatacgtcgaatgacaaaggcgctgtatggtcaggcgtctgtcattcgacgaatgattaaggtatcaggcagtttcgtggcgtctgttgtccttacgttattcttaaattgtcaggatctctggacgcccggtctgagtcgtgctaagttagtattgacttcgaattaaacataccttattaagtttgaatctggttttatccgtcacttcccgttttttctcgcacgagaagtggaaagattcctggctcttcgctcattccgtcttgtcgtttcagttctgcgtactttcctgtgaccagacagcgaacagacatgagttgatagccgtaaacaggcatggatgaccctgccataccattcacaacattaagttcgagatttaccccaagtttaagaactcacaccattatgaatcttaccgaattaaagaatacgccggtttctgagctgatcactctcggcgaaagtatggggctggaaaacctggcccgtatgcgcaagcaggacattatttttgccatcctgaagcagcacgcaaagagtggcgaagatatctttggcgacggtgtgctggagatattgcaggatggatttggtttcctccgttctgcagacagctcctacctcgccggtcctgatgatatctacgtttcccccagccaaatccgccgtttcaacctccgcactggtgataccatttctggtaagattcgcccgccgaaagaaggtgaacgctattttgcgctgttgaaagttaacgaagttaactacgacaaaccggaaaacgcccgtaacaaaatcctctttgagaacttaaccccgctgcacgcaaactctcgtctgcgtatggagcgtggtaacggttctaccgaagacttaacggcgcgcgttctggatctggcttcgccgatcggtcgcggccagcgcggtctgattgtcgcgccgccgaaagcgggtaaaaccatgctgctgcagaacatcgcgcagagcatcgcgtataaccacccggactgcgtgctgatggtgctgctgattgacgaacgtccggaagaagtgaccgagatgcagcgtctggtgaaaggcgaagtggttgcttctacctttgacgaaccggcatcccgccacgttcaggttgccgaaatggttatcgagaaggcgaagcgtctggttgaacacaagaaagacgttatcatcctgctcgactccatcacccgtctggcgcgcgcctacaacaccgtggtgccggcttccggtaaagtattgaccggtggtgtggacgctaacgccctgcatcgtccgaagcgtttcttcggcgcggcgcgtaacgtggaagagggcggtagcctgactatcatcgcgacggcgctaatcgataccggttccaagatggacgaagttatctacgaagagtttaaaggcaccggtaacatggagctgcatctctcgcgtaagatcgctgaaaaacgtgtcttcccggctatcgactacaaccgttccggtacccgtaaagaagagctgctcaccactcaggaagagctgcagaaaatgtggatcctgcgtaaaatcatccatccgatgggtgaaattgacgcgatggaattcctcattaacaaactggcgatgaccaaaactaatgacgactttttcgagatgatgaagcgctcataacctggtctttacctgaaaacgccacgtttttacgtggcgtttttgttttgcgattcatcctggcgtcatgtcatataaactggtcatcgggatatgcgctacagagtaacaccatgcacaatacacattgtttgcggtaaaaagtgtaatgttctaacaggtctcttctaggagctggcgtaacgcattatactttaaggaaatgatatatgctgagagcacatacactgtgaagttactcaccgctttatctgagctaatcagtatttttttattcacgaccatttttatttttcttgcgcgaaaagtagccataaaaattggtttagtggataaaccaaactttcgtaaacgacatcagggcgttatcccattagtcggcgggatttctgtgtttgcaggaatctgctttatgtttggcctctcggattactacataccgcacttatcgctatatcttatttgcgctggtgtattggtttttgttggtgcgatggatgaccgttttgatatcagtgtaaaaattcgtgctgtggttcaggctgttattgcggttgtaatgatggttatcgcaaaacttcacttaggtagccttggttacatctttgggccttgggagttagtgcttggcccctttggctatttccttactctgtttgcggtatgggcggcgatcaacgctttcaatatggtggacggtattgacggcctgctgggtgggttatccagcgtctcatttgcggcgatggggctgattttatggtttgatggtcagactagtctggcaatgtggtgctttgccatgatcgccgcgattctgccttacattatgcttaatctcggtattttggggcggcgttacaaagtctttatgggcgatgccggtagtacactgattggctttaccgtcatctggctcttactggaaacgacgcaggggaaaactcactctatcagcccggttaccgcgctatggattatcgctattccattgatggatatggtggcgattatgtatcgccgtctgcgtaaagggatgagccccttttcccctgatcgccaacatattcatcatttggttatgcgagcagggtttacttcccgccaggcatttgttcttattacgctcgcagcggcgattctggcgggagtaggcgtaacggcagaatactctcattttgttcctgaatgggttatgttggtgctctttttgctagcattcttcctctatggctactgcattaagcgggcctggaaggtggcgagatttattaagcgtgtgaagcgtcgcctgcgcaggcaacgtgagaaccggccaaacttaaccaagtaaatgaggatacgatgacacaaccattaccgggggcacgcgcggtgagcgctgaaaatgaactggatattcgcgggttgtttcgtactttatgggctggcaaattctggattatcggcattggcctgctatttgcccttatcgcgttagcctataccttttttgctcgtcaggagtggagtgcgacggcgatcaccgatcgcccaaccgtaaatatgttgggcggttattactcccagcagcagtttctgcgcaacctggatattaagaccgatcctgcttcttctgataagccctcggtgatggatgaagcgtataaagagttcatcatgcaacttgcctcctgggatacgcgtcgcgatttctggttacagacggactattacaagcagcgaatggtcgggaatagcaaagctgatgcggcgatgcttgatgaactgatcaataacatacagtttacgcccggcgattttacacgcgccatcaacgacaatgtgaagctgattgctgaaactgcgccggacgccaataatctgctgcgtcagtatgtcgcattcgccagccagcgggcggcgagccatctgaatgatgaattaaaaggtgcctgggctgcgcgtaccgtgcagatgaaagcccaggtcaaacggcaggaggaggttgcgaaagcgatctattcgcgtcgtgtaaacagtattgagcaggcgctcaaaattgcggaacaacataatatttctcgtagcgcgacggatgtcccggcggatgaattaccggactcagagctttttttactcggtcgccctatgttgcaggcgcgtcttgaaaatctgcaagcggttggccctgcgttcgatttggactactttcaaaatcgggcaatgttgaatacgcttaatgtggggccgaccctggaccctcgttttcagacctatcgttatttgcgtacgccggaagaaccggtaaaacgtgatagcccacgccgagccttcctgatgatcatgtggggtatcgttggggcgctaatcggtgcgggcgttgccttaacccgtcgccgcacgatttagcaacacctctgcagtagggggctgggcccctactgtctattcgaagagaatcgatgtgaaagtactgactgtatttggtacacgaccggaggccattaagatggcgcctctggtccatgcgctggaaaaagatcctcatttcgaggccaaagtatgcgttactgcgcagcatcgggagatgcttgatcaggtattaactcttttttctattgtgcctgattacgatctcaacattatgcagccgggacaggggttgacggaaattacctgccgaattctggagggattaaagccgatcctggcagattttaaacctgatgtggtgctggttcatggcgataccaccactacgattgctaccagcctggcggctttctatcaacgaattccggtagggcacgtagaagccgggttgcgaaccggcgatctctattccccctggccggaagaggcaaaccgcacgctgaccggacatctggcgatgtaccactttgcgccgacggaaaactcgcggcagaatctgttgcgggagaacattccggatgagcgcatttttgtcactggcaataccgttatcgacgcgctgatctgggtacgcgatcgcgttctgacgagcgatacattacaggctgaactggccgagcagtatcctttcctcaacgcgaataagaagatgattttagtgaccggtcatcggcgtgaaagctttggtcagggctttgagcatatctgccaggcgctggcggaaatcgccgccgcgaaccagaatgtgcaaattgtctatccggtgcatctcaatcccaacgtcagcgaacctgtcaaccgtatcctcggccatgttgaaaacgtggtactgattgagccgcaggactacttaccttttgtctggctgatgaatcacgcctggctcattctgaccgattccggcggtattcaggaagaagcgccgtcattaggtaagccggtattggtcatgcgtgaaaccacagagcgtccggaagccattaccgctggtacggtaagactgatcggcacggactcccggcgcattgtggcggaagttatgcgtctgctgcacgacgaaaatgaatatcaaaccatgagccgcgcccataatccttatggtgacgggcaatcatgcgcgcgcattttacaggcgttaaaaagttatcgggtatcgttatgagttttacgaccatttctgttattgggctggggtatatcggattaccgactgcggccgcttttgcttcccgccagaagcaggttatcggcgtggatatcaaccaacatgcggtagacattataaatcgcggtgaaattcacatcgtggagccggcgttgggcaatgtggtgaagatggcggtggagggcggctttctgcgtgcgacgacgacacctgtcgaggccgatgcgtacctgattgccgtgccgacaccattcaaaggcgatcacgaccctgacatggcctatgtcgaagccgcggcgaaatccattgcgccagtattaaaaaaaggggcactggtgattctggaatcaacatcgccggtcggcgcaacggagcaaatggctggctggctggccgggatgcgcacggatctgacctttccccagcaggcgggcgagcaggccgatgtgaatatcgcctattgtccggagcgtgtgctgccgggtcaggtgatggtggaactcattaaaaatgaccgcgtgattggcggtatgacgccagtatgttcggctcgcgccagcgcgctgtacaaaattttccttgagggcgaatgcgttgtcaccaactcgcgcaccgcggagatgtgcaaactgacggaaaatagcttccgtgatgtgaatatcgcctttgcgaatgaattgtcgctgatttgcgccgaacaggggattaacgtttgggaattgatccgcctggcgaaccgccatccgcgcgtcaatattttgcagccgggcccaggcgttggcgggcactgcattgcggtcgatccgtggtttattgtggcgcaaaatccgcagcaggcgagactgattcgcaccgcgcgtgaagtgaacgacggcaaaccgcactgggtggtcgatcaggtaaaagccgcggtcacagattgcctggcggccaccgataaacgcgccagcgaagtgaaaatcgcctgttttgggctggcctttaagccgaatatcgacgatctgcgcgaaagcccggcgatggggatcgcgcaaagtatcgcccgctggcacagcggcgaaaccctggtcgtcgaaccgaatatccgtcagttgccgaaaaaattggacggactttgtacgctggcgaaactggacgcggcgctggccgccgccgatgtgctggtgatgctggtcgatcacgacgaatttaaagcgattcccggcgatgcggttcatcaacgttatgtggttgataccaaaggagtctggcgctgatgaaacgcattctggtgaccggcggcgcaggctttatcggatctgcggtggtgcggcatatcatccatgaaacggcagacgcggtggtggtggtggataaactcacctatgcgggcaacctgatgtctctggcgtcggtggcgcaaagcgaccgtttcgcctttgagaaggtggatatctgcgatcgggcatcactggagcgagttttccagcagtatcagcccgatagcgtgatgcacctggcggcggaaagccatgtagaccgttccatcgacggcccggcggcgtttattgaaacgaatatcgttggtacttacaccttgctggaagccgctcgcgcttactggtccgcgcttgacgcggacgctaaagcggcgttccgcttccaccatatctccaccgatgaagtgtatggcgatctgcatactgcagacgatttcttcaccgaaaccacgccatatgcgccaagcagcccttattccgcctccaaagccagcagcgaccatctggtacgcgcctggttacgtacctacggtctgcctacgcttgtcaccaactgctctaataactacgggccctaccatttcccggaaaaactgatcccgctgatgattctgaacgcgctggcgggtaaaccattgccggtctatggcaacggtcagcaaattcgcgactggctgtatgtggaggatcatgcccgtgcgttgtatcacgtggtgacgaacggcgcggtgggtgaaacgtataatatcggcggtcataacgaacgtaaaaatctggatgtggtcaggacgatctgcgctctactggaggaactggccccgcaaaaaccgcagggtgtggtgaattatcacgatctgattaccttcgtcgacgatcgccccggccatgacttacgttatgccatcgacgcgtcgaaaatcgcccgcgagctgggctggacgccgcaggaaaccttcgaaagcgggatgcgaaaaaccgttcagtggtatctcgccaatgaggcctggtggaaacccgtgcaggatggcagttatcagggcgaacgcttaggactgaaacgctaaacggcaggttcttactcctggaggagaaacgaatgaaaggcatcattctggcgggaggttccggtacccggttgcatcccattacgcgcggcgtatcaaagcgccagggcttcaaaattgcctgtctggaggagattgcctggcgcaacggctggctggatgatgatggtttgaaacgcgccgccagtcagcttgaaaaaaccggctatggccaatatttactggagttgctccgtgcccgtccgcgccagtattgaaccgttactctgggaaaatacgttctttggcgtgaatagcggcattgtgcgtatcgatgcctcagcgcccgaattaacgccagaagcactgcaggcgtggcaacgcgtgcaggtaaaagtgccggctgaaaacatcgcctggctgtcggcgttgcaatcgctgggattctctttggttgaaggcgaggtggattttgcgttgccggtaaaagggcatcgcgaccagcatggcgcggaaattgcacaccttacggacattcctgctttgcgtcagttggccggagaggcgtttacgcagagtcgttttcgcgcgccgtggtatgcgcccgacgccagcgcccgtttttacgcccagtggattgagaatgcggtacgcggcacgtttgatcaccaatgcctggtgcttcgcacggagacaggcgctatccgcggttacgtctcgctgcgggaattgaatgataccgacgcgcgcattggcctgttggccggacgcggcgcgggagcggaacttatgcaggcggcgatctgttgggcgcagagtcgcggcaaagcaacattgcgggtggcgacccagttgggcaacaccgccgcgcttaaacgttacatacaaagcggtgccaacatcgaaagcactgcgtactggttatacaggtgacaacatgattccttttaatgcgccgccggtggtgggaaccgaactcgaatacatgcagtctgcaatgagcagcggcaaactgtgcggcgacggcggctttacgcgtcgttgccagcagtggctggagcaacatttcggcagcgcgaaggtgttgctaacgccttcctgtaccgcatcgctggagatggcggctctgttgttggatattcagcccggcgatgaagtgatcatgccgagctttacgtttgtctccaccgctaacgcttttgtcctgcgcggcgcgaaaattgtgtttgtcgatattcgtccggatacgatgaatattgacgaaacgctgattgaggcggcgattactgataaaacccgcgctatcgtgccggtacactacgctggcgtcgcttgtgaaatggacgtcatcatggcgctggcggataagtataatctgttcgttgtcgaggatgccgcccagggtgtgatgtccacgtacaaagggcgcgcattagggacgatcggtcacatcggctgttttagcttccatgaaaccaaaaattacaccgctggcggcgaaggcggcgcgacgctgatcaacgatcgtacgctaattgaacgcgcggagatcatccgcgaaaaaggcaccaaccgtagccagttcttccgtggtcaggtggataaatacacctggcgggatatcggctccagttatttgatgtccgatctgcaggctgcctatctgtgggcgcaactggaggccgccgatcgtatcaatcaacagcgtctgtcgctgtggcagacttactacgatgcgttaacgccgctggcgcgcgccgggcgtttcgagctgccttctattccggaaaactgcgggcataatgcccatatgttttacatcaaactgcgggatatcgccgatcgcagcgcgctgattaatttcctgaaagaggcggaaatcatggcggtattccattacattccgctgcatgattgtccggcgggcgataaattcggcgagtttatcggggacgatgtctacaccacaaaagagagcgaacgtttgttgcgtctgccgctgttttataaccttgcgcccgtcgatcaacgaacggtgattactaccttgctaaattatttctcctgatatgtcgcttgctaaagcctccctgtggacggcggtcagtacgctggtaaaaattggcgccggactgctggtggtgaaactactggccgtctcttttggtccggcgggcgtcggacaagcgggtaacttccgccagatgattaccgtgctgggcgtattggctggcgccgggatatttaacggcgttaccaaacttgtcgcacaacatcatgataacccggcgcagttacgtaccgtggtgggaacctcctccgcgatggtattggggttctctacgctgctggcgctggtcttcttgctggcggcggcgccgattagccagggattgttcggtcatacggactatcaagggctggtgcgtctggttgcgctggtacaaatggggatcgcctgggcgaacctgctgctggcgctaatgaagggctttcgtgacgcgtcgggtaatgccttatcgttaattgtcggcagctttttgggcgtcgccgcctggtatctctgctaccgtgtcggcggctatgaaggcgctctgcttggcctggcgctggtgccggcgctggtggtagtgccagccggtataatactgattaagcgcggcaccgtcccgctacgctatctcaagccctcctgggacaacggtctggcagggcagctcagtaaatttaccctgatggcgctgattacctccgttacgatgccggttgcctatgtgatgatgcgaaaccaactggccgcgcactatagctggagcgatgtcgggatctggcagggcgtaagcagtatttctgacgcctatctgcaatttatcaccgcctccttcagcgtttacctgttacccacgctctcacgcctgacggaaaaacaggacattacgcgtgaagtggtaaaagcgctgaaatttgttttaccggcggttgcggcggcgagttttaccgtctggctactgcgcgattttgctatctggctgcttttttccgctaaattcaccgcgatgcgcgatctgttcgcctggcagttagtgggcgacgtgctgaaagtcggcgcctatgttttcggttatctggtgattgccaaagcgtcgttgcgattttacattctggctgaaattagccagttcattctgttaacggcgttcgctcactggctgattcccgctcacggcgcgctgggtgcggcacaggcttatatggccacctatattgtctatttttcactttgttgcggcgtatttttactctggcgtaggcgagcatgactgtactgattcacgtcctgggatcggatatccctcaccataaccacaccgtgctgcggtttttcaatgatacgctggccgccacaagcgagcacgcgcgcgaatttatggttgccggcgaagataacggcttcacggaaagctgcccggcgctctcgcttcgtttttatggcagtaagaaagcgctggcgcaggcggtcatcgccaaagcgaaagcaaatcgtcgacagagattcttctttcacggtcagttcaacaccagcctgtggctggcgctgttaagcggcggtattaagccagcccagttttactggcatatctggggcgcggatctctacgaagtgtcccacgggctgaaattccgccttttctacccgcttcgtcgtatcgcgcaggggcgagtagggggcgtattcgcgacgcgcggcgatctcagctattttgcgcgtcagcatccggacgtacgcggcgagttgctctatttcccgacgcgcatggacccttccctgaatgctatggcaaaagagcgccaacgtgcggggaaattgaccattttggtagggaactccggcgatcgcagtaaccaacacattgcggcgttacgggcggtgtatcagcagtttggcgacacggtaaacgtggtggtgccgatgggctatccggccaataaccaggactatattgatgaggttcgtcaggccggtctggcgctatttagcgccgaaaatttacaaattcttagcgaaaaaatggaatttgatgcctatcttgcgctgttgcgccagtgcgacctcggttattttatttttgcccgccaacaggggatcgggacgttgtgtctgctaattcaggccgatatcccgtgcgtactgaatcgcgacaatcctttctggcaggatatggcggaacagcatctgcccgtcctgtttaccacggacgatcttaatgagcaggtcgtgcgcgaggcgcagcgtcagctcgcatcggtagataaaagcggcatcaccttctttagccccaactacctgcaaccgtggcataatgcgttgagaatcgccgcaggagaagccgaatgagtttaatgcaattcagcgggctgctggtggtctggctgctctctacgctgtttatcgccacgctgacctggtttgaattccgccgcgtgcgttttaacttcaacgttttcttttcgttgctgtttttgttgaccttcttttttggttttccgctaaccagcgtgctggtatttcgtttcgacgttggcgtcgcgccgccggaaatcttattgcaggctctattatccgccgcctgtttctacggcgtgtattacgtgacctataaaacgcgtttacgcaaacgcgttgtggatgtaccacgcaagccgctatttaccatgaaccgggtggaaacccaccttacctgggtgatcctgatgggcatcgcgctggtgagcgtggcgattttctttatgcataacggctttttgctgttccggctgcactcctacagccagatcttttccagcgaagtctccggcgtggcgttaaaacggttcttctatttcttcattccggcgatgctggtggtctatttcctgcgccaggacagcaaagcgtggctgttctttctggtgagcaccgtcgcgtttggtctgttgacctacatgattgtcggcggcacgcgcgctaacatcattattgcgtttgctatcttcctgtttatcggcattattcggggctggatcagcctgtggatgctggcggcggcgggcgtgctggggattgtcggtatgttctggctggcgctcaaacgctacggattaaatgtgagcggcgatgaggcgttctatacgtttctttatctaacgcgcgataccttttcgccgtgggagaatctggcgctgctgttgcaaaattaccacaatatcgagtttcaggggctggcccctatcgtgcgtgatttctacgtctttattcccacctggttatggccgggacgacccagtattgtgctgaactctgcgaattacttcacttgggaagtcctgaacaaccattctggcctggcgatatcgccaacgcttatcggatcgctggtggtcatgggcggggcgctgtttattccgctcggcgcgatcgtcgtcgggctgattatcaaatggttcgactggctgtatgaactgggtaaccgggagcccaatcgctataaggcggcgattctgcacagtttctgctttggcgccatctttaatatgattgtgctggcgcgagaagggctggattcgtttgtttcgcgcgtggttttcttcctggtggtttttggcgccagcctgctggtcgctaagcttctgttctggttatttgatagcgccgggctgattcataaacgtacaacttcgctccctcaggcacaggtggaaggaaaactatgaccaataatgccgctgcgcccctttactcgctgcgtggattacctctgattggctggcgcgacatgtcacacgcgctgaattatctgtttgccgatggtcaactgaagcaaggcacgttggtggcgatcaacgccgaaaagctgctgacggcggaagataatccggaagtccgcgcgttgatagcggcggcggaatttaaatatgccgatggcatcagcgtggtgcgttcaatacgtaaaaaatttccgcaggcgcaggtttctcgtgtggctggcgccgacctttgggaagcgttaatggcgcgcgcgggaaaagaaggcacaccggtatttcttgtcggcggcaagcctgaggtgctggcgcagacggaagcaaaactgcggacgcagtggaacgtcaatattgtgggtagccaggacggttactttacgccggagcagcgtcaggcgctatttgcgcgtatccatgccagcggcgcgaaaattgtcaccgtcgcgatgggatcgccaaaacaggaattgctaatgcgcgattgtcgggaagtgcatccccatgcgttatatatgggggtgggcgggacctatgatgtgtttactggtcacgtcaaacgcgctccaaaaatatggcagaacctgggactggagtggttgtatcgtctgctttctcaaccgaggcgtattacccgccagatgcgcctgctgcgctatcttcgctggcactatactggcgatctctaattctcccttctgatgacttgagcagcggattgtgcttatggtgctgctcatttacaacataatcgatgatttcttacacaataagtgcatttttttaatgctccatttgccatttgtccaaatttaagaaaatattcgcaacaatcgatgtacccataacaataaccggtactaccggaaccgttgcaaacacgacatgaggatttatggcagagaaaaaaccggagctacagcgtgggctggaagctcgtcatattgaattgattgccctcgggggcaccatcggcgtcggactctttatgggcgccgccagtacgctgaaatgggcgggcccgtcagtgctgctggcgtatatcatcgccggattgttcgtctttttcatcatgcgttcgatgggggagatgctctttctggaacctgttaccggctcctttgccgtgtacgcccaccggtatatgagtcctttttttggctatcttaccgcctggtcatactggtttatgtggatggcggtcgggatctcggaaattaccgccattggggtctacgtccagttctggtttccggagatggcgcagtggataccggcgctgattgccgtcggactggtcgcgttggcgaatctggctgcggtgcgcctgtatggtgaaatcgagttctggtttgcgatgatcaaagtcaccacgattattgtgatgatcatcatcggtctgggggtgattttcttcggctttggtaacggcggccaggcgattggctttggtaatctgaccgagcatggcggcttttttgccggcggctggaaaggctttctcaccgcattgtgtatcgtggtggcctcttatcagggggttgagttgatcggtattaccgccggtgaagcgaagaatccgcaggtgacgttgcgtagcgcggtgggtaaagtgctgtggcgtatcctgattttttatgttggcgcgattttcgtgatcgtcaccattttcccgtggaatgagattggcagcaacggcagcccctttgtgctcaccttcgcgaaaatcggcatcaccgccgcggcaggcattatcaactttgtcgtgctgacggcggcgctctccggctgtaacagcggaatgtatagctgtgggcgtatgctttacgcgctggcgaaaaaccgtcaactgccggcggcagtcgcgaaagtctctcgccacggcgtgccggtcgcgggcgtggcgctctctattttgattttgctggtaggttcttgcctgaactacatcatccccaatccgcagcgcgtctttgtttacgtttatagcgccagcgtactgccggggatggtgccgtggtttgtcattctgattagccaactgcgctttcgtcgggcgcataaagaagcgattgcggatcatccttttcgttccattatgtttccgtgggcgaactatttgacgatggcgtttctggtttgcgttttaatcggcatgtactttaatgaagatacgcgcatgtcgctgtttgtcggcgtcatcttcctgctggccgtcacgctggtctacaaagttttcggtctgaatcgtcacggaaccgcccacaaggtgggggaataagcgccaaaatgcgcaaagcataaccaaacgcgcattttatttaaaaaggcactggacagcggggtgtgaagtccgtattatccacccccgcaacggcgctaagcgcccgtagctcagctggatagagcgctgccctccggaggcagaggtctcaggttcgaatcctgtcgggcgtaccatttatttaggtgcttgagctgcggtggtttaataccgcgtaaaaagtttcagtggtggctatagctcagttggtagagccctggattgtgattccagttgtcgtgggttcgaatcccattagccaccccattaatatagagttgtgaaacgcgaaggtggcggaattggtagacgcgctagcttcaggtgttagtgtccttacggacgtgggggttcaagtcccccccctcgcaccacgactcaatgaattgaactaaaaattcaaaaaagcagtatatcggcgagtagcgcagcttggtagcgcaactggtttgggaccagtgggtcggaggttcgaatcctctctcgccgaccaattttgaaccccgcttcggcggggttttttgttttctgttccttttcaaccccttatcccgcacgtgttgccattatgatttgttggcgatatcccaggcttcatttgtcgctattcggtgacgagtaatctattgatttataatcactttgtaaaaagcatcctgttctgtctccaccgggcgacacgctaaaacctcgccagcggcggggggatgacaatcgcgtgaattctctacgtttttttaatgcctgcgcctgttttttagcggtgcaaagatggcacgttatgtgcaataatgtacgggtagatgctcattccatctcttatgttcgccttctggcctcataaactcaggaatgatgcagagccgtttacggtgcttatcgtccactgacagatgtcgcttacgcctcatcaaacaccctggacacaacgttgagtgaagcacccctttatgttgtcatacagacctgttttgacgcctgccccttaaccgggcaggcgtttttttatgcatctcgaatgattttgtgtaggcggtaggcccggtaagcgaagcgccaccgggcaagagggaattactgcgggggattgttctgtaatgtcagcatcaggccgtcgcgccgcatggcggcggcctcttccggttgatgcagtcgatcaagcgcatcggcaagccaggcataatcatacgcgtccgggcgttgtttcagcgcggcgcggaaagccagggtcgcctcctgccattcaccgtgtttcattagcgactggccgagcgtgctccataacagcgggcgatcgcctaccgtcttgatttgctggcgcagcactttctccagttgttccggattattggttctgaggcgaggaatgggcagcaccagccgatcgtcatactggcgtttcagaccgtcgatgataatctgctgcgccatatcatgatcgtcacattcgatcagatgctcggccattgcgacctgcagcgccacctgatggcgggttttacggctttggtttttccaccaggtgcgtaatccttcgctgccctgctcggcgcgcgcctgatccatgagtcctatccacgcctgttgttcgagcatagcgcgatgcgcttcatcgccaacgtgcgctttcgccatggatgggatgatatccagtaaagaactccatgcgctggtgcgaatataggcctgctccgccagacgcagaacttccgggtgacgcggcgtgacctccagcagtttgtccacgccgtgacgcgccgcgtgattttcattgcgcgccagctgtaagcgcacgcgcgtgatctcgaccgggatggtgtcgttccccgccagctctgccgcacgttcaaggtgctgattagcgcgcgcttcatcgccgcgctgctgcgctgcttctgccgccagcagataatttaccaccggttgttcagcatgatcggcattttttgacatcagcttttcaacctgctgataatcgccctccgccagcttcagcagcgcctgttcggtctgcttgcgggcgcgacggcgtttacggccggcaaaccaaccgcgggtgtgcgcgccggtacgaaacagacggcgtagtaaccactcaatggcgaatagcaccaccatagcgacgatgagaatgatcgccaggccggtgacgctggtttcaatgttgtagttatcggtctggattaacacatagccctggtgaccggctatcatcgggccgaccacgatacccgcaagcaacaacacaaagagcaataatacttttagcatcattattctccttgcggcgcggctgccggagcgtctgtctgcgtggcaggcgctgccgtagagactgtcggttgcgccagcagattacgcacgcgggtttgcatcagtttttcaagaatcgcctggcttcccagggtttctggcagatccatcgtgatattttgctggcttaatttatcgacctcctccaggaaggcttttgtcgcggcgtcgtcagtatcgtaataagcgcgaacccaggtcgaaacgttatccagcgcctgacggtatgtttcttcctgatggcgtggcacggcctgcgcggcgactaacaggcgggagcgaatattttcgcgtaaatagacgtcctggttgggtgccaacagcggtacggcggtatcatcgcggcggcgaatggtaataaagctgtccataaagttctgccagcttttttgcaggttaacgcgccattcgcttaacgagctggacagctcgctgctgtctgaatccatcggcgaaccatcggtatcgttatccgccagacgcaggttatcgatttggttagagagctgattgagcttgagaataatgccgtcgtagtcgatctgcgcaacggatgacaggctggcgatatcgtcagtaatcgcgcgtcgtgcggtaatcaggctggggtcattcatgtccgccagactggcgtcagcgcttttgagcagcgcagcggcggtagtgacgtcctgatcgctccacagcttgcgtccggcgagtttcaccaggaaatcagcctgcgccagcagccaggttttagcatcgctgccggaaatagtggcgactttttgttgtacttcatcaagctgtttcgccagcgccgcctgttggcgattcgcgtcatctaactgcgccgcttgttttttgataatcccttccagctccgctttttggctctcctgcgccttttgcaaggcggtcagttgcgtcgccagcgcatcgctggtttccgtttgcgcggttgcttgctgtttcccccagccataaagcccaatacctgccgccagggcaatcgcaatcgccaccgcgcttaataccagcgcggcgccgttcttactttttttctcggtattaactggctgtggcgtggtttccacgctctccctggtctcatcaaccacggcggaggatttttcttgttccgtcattatggcatcccattatgagagttattgtaatgcgcgcaacagcgcatcgttgtcggcgttatcagcgaccttaatatcttgccagcccagttcccgggcgaggtgcgccagacgctcactgacgaccaatagccgacagcgtagtaaccagtgctcacgataccactggggagtcagcgaccagagccgttgcaacatctcgccgctggtaacaacaagcgttgttacgccgcgagtatgccagcgcatcgcttcttccgcgccatcgtaatgtttcgcacatcgttgataacattcacaaaaactgacttcggctccgcgcgctgtcagggtttcgcccagcagttcgcggccgccattgccacgcaaaatcagcgcgcgtttgcccgcaatattttgtaattcaggtaattgtagcaaggcttcgctgatttcccgatccaatggataacgaatatcgaacccgctaacggtatgaagggcgagcgccgtggtgcggccaatcgcgaaatagcgcggcgccacaggccagtttcgaccatcccgctggagctgggcgtgagcaaaggcgacagcgtgctgtgaaagggcaaaaaccagatcgttttccgtcagcgtcgccaggcggtcggccagggtgggtagctcccgaccggcgacaaattcaatcagtggaaaactccaggccacctgccccagtgcgcgcagacggctcactaacgcttcccctgcgggagaggggcgggtgatcagaatactcatgcgggcgtctcgccgttataaacttccgtcagaatcgcgcgtgcgccgttttccagcagttcctctgcaagcgagatgcccatttgctccgcctgctcgggagaaccacgacgttcgccgcgcaccatcaccgaaccgtccggcgcgccaaccagcgcgcgtagccaaatttcaccgttgatgatttctgcatagctgccaatcggcacctgacaaccgccttccaggcgggtgttcatagcgcgttccgccgttacgcgcagcgcggtttgcgagtgattcaacggtgcgagcagcgcctgtgttcgcgcgtcgtcaagacgacactcaatcccgacggcgccctggcctacggcaggaagcgaaacgtcgggcggcaaggctgtgcgaatgcgcgactccagacctaagcgtttcagaccggccacggccaggataatggcgtcatagtcgccgttgtccagcttgccgagacgtgtgccgacgttgccgcgcaacgaacggataatgaggtccggacggcgttccgccagttgacactgacgacgcaaactggacgtcccgacgatactacccgcgggcagatcgtccagactgtgatatttattcgagacaaacgcgtcgcgcggatcttcgcgctcgcaaatggtcaccagaccgagaccgtccgggaaggccaccggaacgtctttcatagagtgcacggcgatatcagcacgtttttccagcagcgcgatttcaagctctttaacaaacagtcccttaccgcccactttcgccaggggagtatcgagaatcacgtcgccgcgtgtgaccatcggcaccagttctaccgtcagtcccggatgggttgccatcaatgcgtctttgacataatgtgcctgccaaagcgcaaggggactttggcgtgtggcaattcttaaaacattgtctaacatgcttgttaccgtcattatcaatcattgaccatcctaacatccttatagagagtatgttagttttccggtcaccgtgagtgagaggataaggcgcagtgtcgtcaatgacagtgaataatgacgagaaaccgccagcccgtatttaagaatttacacgcagcgaacggtgctacacttgtatgtagcgcatctttctttacggtcaatgagcaaggtgttaaattgatcacgttttagaccattttttcgtcggtattagataaaaatatgcaggcgagaaagggtaacggttatttttgacatacggtttatcccgaatggcgacggtcaagtactgacctgcaccatgacgggtagcaacatcaggcgatacgtcttgtacctctatattgagactctgaaacagagactggatgccataaatcaactgcgtgtggatcgcgcgcttgctgccatgggacccgcttttcagcaggtttacagtcttctgccgacattattgcactatcaccatccactgatgccgggttaccttgatggtaacgttcccagcggtatttgcttctacacgcctgatgaaacccaacgccactatctgaacgaacttgagctgtaccgcggtatgacgccgcaggacccgccgaagggcgagctgccgattaccggcgtttacaccatgggcagcacctcctcggtcgggcagagctgctcgtccgacctggatatctgggtgtgccatcagtcctggctcgacggcgaagagcgtcagttgctgcaacgtaagtgtagcctgctggaaagctgggccgcctcgcttggcgttgaggtgagcttcttcctgatcgacgagaaccgtttccgccataacgaaagcggcagtctgggcggggaagactgtggttctacgcagcatatcctgttgcttgatgagttttatcgtaccgctgtgcgcctggccgggaagcgtatcctgtggagtatggtgccgtgcgacgaagaagagcattacgacgactatgtcatgacgctctatgcgcagggcgtattaacgccaaacgaatggctggatctggggggcttaagctcgctctccgccgaagagtactttggcgccagcctgtggcagctatacaagagcattgactcgccgtacaaagcggtgctgaaaacgctgctgctggaagcctattcatgggaatatcctaacccacgtctgctggcgaaagatattaaacaacgtctgcatgacggtgaaatcgtatcgtttggactcgatccctactgcatgatgctggaacgggtcactgaatacctgacggcgattgaagatccgacgcggctggatttagtccgccgctgcttttacctgaaagtgtgcgagaaattaagtcgcgagcgtgcctgcgtaggctggcgtcgggaagtattaagccagttagtcagcgagtggggatgggacgacgcgcgtctgaccatgctcgataatcgcgcaaactggaaaatcgatcaggtgcgcgaagcccacaacgaattgctcgacgccatgatgcaaagctatcgtaatctgattcgctttgcgcggcgcaacaacctcagcgtgagtgccagcccgcaggatatcggcgtactgacgcgtaagctgtacgcggcttttgaagcgttgccgggtaaagtcacgctggtgaacccgcagatatcgccggatctgtccgagccgaatttaacctttatccatgtgccgccgggacgcgccaaccgttcaggctggtatctctacaaccgcgcgccgaacatggattccatcatcagccatcagccgctggaatataaccgttatcttaataagctggtcgcgtgggcgtggttcaacggcctgctgacgtcgcgaacgcatctgtttattaagggcaacggtattgtcgacctgcctaagttacaggagatggtcgccgatgtttcgcaccatttcccgctgcgcttgcctgctccgacgccgaaagcgctctacagcccctgtgaaattcgccatctggcgattatcgttaacctcgaatatgacccgacggcggcgtttcgcaataaagtggtccattttgacttccgtaagctggacgttttcagctttggcgaagagcaaaactgtctgataggcagtatcgacttgttatatcgcaactcgtggaacgaagtgcgtactctgcactttaacggcgagcaggcgatgatcgaagcgctgaaaacgattctggggaaaatgcaccaggatgccgcgccgccggatagcgtggaggtgttctgctacagtcagcatcttcgcggcctgattcgcacccgtgtgcagcaactggtctccgaatgtattgagctacgtctttccagcacccgtcaggagaccggtcgcttcaaggcgctgcgggtttccgggcagacgtgggggctattcttcgaacgcttgaatgtctcggtgcagaagctggagaacgctatcgaattctacggcgcgatttcgcataacaagctgcacgggctgtcggtacaggtggaaaccaaccaggtgaaattgccgtcagtggtggatggcttcgccagcgaagggattatccagttcttctttgaagaaacaggcgatgagaaaggctttaacatttatattctggatgaaagtaaccgggcggaagtatatcaccactgcgaaggtagcaaggaagaactggtgcgcgacgtcagtcgcttctattcgtcatcgcacgatcgcttcacgtatggctccagttttatcaactttaacctgccgcagttctaccagatagtgaaaaccgatggccgcgcgcaggtgatcccattccgtacgcagcctatcaacaccgtgccgccagcaaaccaggatcatgacgcgccgctattgcagcagtatttttcgtaagtgctgcgccgggcaaagctgcccggccggcgttcaccgcttcacattaacttcacccaacttcgttaccgtgacctccgcatttggtttacaggaggaggtttgaggtggcagatgcgttcattttgttagggatagtcatggcgatggtcagcctcggcttcattcttataaataagttattctgttttatatctgctgggtgcctgctctcgttatgcgccagcatggccagttttcaactctgggatgcatcttactgggggcgatggggaaaagtatgtcccggcctggatgtgatcatctcctgcgacaattaccattttctctatgacttgggatgggaattgtacggtatcgcctttttgttctttaccgcgttaatgctcacatgtgcggccattattcttatcaatatgattatggctttagagcgatactgtgccggatggcggcgctaacgcgccttatccagcctacattcgaagaatgctcattgagcggaacaaggtttagataatattttttcttatacaatttatgtagtaatattcagaccgttcaaaatgctatcgcgtccttcattgttttcgtaaatatgttttgaaaaactatattagaaacaaaagctctttaatggtttcttatggatgtttttataaaaggatattatatgtcaataaacaaccctattcttatttgcgtgaataagaaacgacaaataaaattagctctgttttattcagtggtagctatagctcttatgatgagcctctttctaaattatagtattatgctaaagatggtgtgtgtttttttaatactcctcatgatagcaggcgcaagtgcttactggtactccgccttttcaggaaagccacagctaacgttgaaccaggagggagtaacattacacacaaccaggctaccaatagtttactggcatgaaatcgactatgttggtgagcgtgttagcgataatacgcctgtgctggccatttttgtcaaagatgttgagctttattgtcagcgaattactaatgagaaaatgcgtaataattttctgtcattattgaataagcatgaaagtaatcgcgtgatgaatatctctctaaacgatctcgattatgactcagatgagttacaggatatttttaaaatggctgttgccagaaacctggaacaatagggtagagatatatgttttttgttattactcaccatattgatgtgctgcctctggcaaccctacccacacatgaaacatgcccttattgtaataatcaggatgtatggttgattattcgccaaaaaaggacccgtacatgtggtctgtctcaagcgagaaaaagagataagtttggtttagcgatatgcaatcattgcagcaatgaaatcaaggaaaaacgttggtcaccagcgttacgtcaactttttaccgagcagaagccactatttaacctaaccttttggcaacgctacggtttttgggttggttggttgagtgtatggcccgcgctgtttctggcaacctggctgtatttcacatttcggggttggtaatacgaccgcatatctcgttaaatatacgcaggaaagcgctattcttctggctctcctgcggaattaaaacttagcgaaaactcaccttttcacccgcttgttgcgttgccgcctgctccagcagatcccagaaggtttcgccgctgcgatcgcaaacccactcgtcgcctttcagatcgaaatgatagccgccctgtttggtcgccagccacacctggtgcaacggctcctgacggttaataatgatgttactgccgttctcaaagctgagggtcagcacgccgccgttgatttcgcagtcgatatcgctgtcgccgtcccagctatcgaggcgttcttcaatggtgagccacagggcgtcagccaggcgatgaaattcactgtcgttcattgttttatcccgctattgagtgatagcgccagtataaggggaagcgtcagcttctggaaccgatacgaattaccgttgtgagcggtaaaggataaaactcagcggtaggtaaatgacgataaatagcgcaccggtgataagtatgacggacgcgttaaccgggaaatggttcagagccgacagcattgccaccatcagtgcgacgcagccgccgcagaggagaaaatgcaacaggattaagggggcgcgcggctttgctttgatatccaaaagagcgctaagcagaccgagtaccgcgcttatcgtcaggactccggcagcttcaacaccgtttatcgtgccgtgcataatgctttcaataatgacgtaaatgcatgaaccgatccccacgccccgaagggcgtttttcaaatgtttaatcaagtgcgcaaaacggtttagcggcgtcatttttggcattccggtgcctgcgttatgatgatgatgtctttattgttggtgtacatgacgttcctattcagagtatgcgtcttatccgggcagggggatgctgttcggtaaagctggctgccaatccacgtataaactagcggttgtcatacgcaaaacgctcggtgacttttagcggcccattgatgctaaagacatgaataccctgaccttgctggctatcacgcataaaatagccatgctcttttccggcgttaatttcccggttcaggaagggggttgcgctatccagttccagccctgagttgccgggttaatcaatgaattgggtaaccgacgcaggcgtttgaaactcacctccggcaacgaaagattgttctcctcttctggctggagataaaccacgccgctgccttgccgctgataaacattgtgcggagattcactcagccggcatccccaggcgggaggcagcagaagtgaaagcgaaaaaaggcaaaacaaattacgatattgcataaggtcatccggacgtggtacgtaaacctaaagtgatgagcaaagcatgtttcctgatgtaaatgcgcaataatcatggcaacgcgccgcttttcagattttataaagagcccctaaacgcttgcttttacgccttctcctgcgatgatagaaaatagaaagcatgaacttacaggcaatccataatgaaaaacgtgtttaagacactcgctgtacttctgactctgttcagcctgacgggctgcggtttgaaagggccgctttatttcccgccagccgataaaaatgcgccgccgccgacgaaaaaagtcgattcgcaaacgcagtccacgatgcccgataagaacgatcgcgcaacgggagatggcccgtcccaggtcaattactgaggatagttttctgtccccgcgtgaacggagtgaatgatgcaattctctaaaatgcatggccttggcaacgattttatggtcgtcgacgcggtaacgcagaatgtctttttttcgccggaactgattcgtcggctatccgacagacacctgggcgtagggttcgatcagctgctggtggttgagccgccctatgatcctgagttggactttcattaccgcatcttcaacgccgacggcagtgaagtctcgcagtgcggcaatggcgcgcgctgtttcgcgcgatttgttcgcctgaaagggctaaccaataaacgcgacattcgggtcagtaccgcgaatggccggatggtactgagcgtcacggaagatgaactggtgcgggtgaatatgggggaaccaaactttgaacccgcgcaggtgccttttcgcgccaacaaagcggaaaagacgtatattatgcgagcggcggaacagaccatactgtgcggcgtggtttcaatgggcaatccgcactgtgtcattcaggttgataacgtcgacacggcggccgttgaaacactggggccggttctggaaagccatgagcgttttccggaacgcgccaacattggttttatgcaggttgtaagacgtgagcatatccggctgcgagtctatgaacgcggcgcaggggagacccgcgcgtgcggcagcggcgcgtgcgctgccgttgccgtggggattcagcaggggctgctggctgaagaagtacgcgtggaattaccgggcggtcggctggatatcgcctggaaaggtccgggtcatccgttatacatgactggtccggcggcacatatctacgacggatttatccatttatgaagcaaccagaggaagaactacaggaaacgctcacggaactggacgatcgagcggtcgtcgattacctgcgccaccaccctgagttttttatccgtaacgcccacgccgttgaagcgatgcgtgttccacatcccgtgcggggaacggtttcgctcgttgagtggcatatggcccgcgcgcgtaatcacatcaatgtgcttgaagaaaatatgacgctgctgatggaacaggctcatgccaatgaaagcctgttttatcgcttgctgcatctgcaaagccgtctggtcgccgcggatagtctggatgagatgctggtgcggtttcaccgctgggcgcgcgatttggggcttgccggcgcgacgctgcgtttgttcccggatcggtggcgtcttggcgcgccatcgcgctatacacatctggctttaaaccgtcaggcctttgagccgctgcgtattcaacggctgggacagtcgcagcattatcttggcccgctaaacggcccggaactgctggtggtcttgccggaggcgaaggctgtaggctcggtagccatgtcgatgatgggcagcgatggcggcctcggggtgattctcttcagcagccgtgacccgcatcactatcagccgggacaggggacgcagcttttacaggagatcgcgctgatgctgccggaactgctggaacgctggattaaacgcgtatgacggatgtcgcgctttctcaggatgtctcgcggttcctgcgctatttaggcgtggagcgccagcttagccccattaccctgctgaactaccagcgtcagcttgatgccattatcgctttagccggagaaaccgggctgaaaagctggcaacaatgtgacgctgcgattgtgcgcagttttgcggtgcgcagtcggcgcaaagggcttggccctgccagtctggcgctacgtctctcggcattgcgaagcttttttgactggttagtcagtcagggcgaattgaaagctaacccggcaaagggtgtctccgcaccgaaagcgccgcgtcatctgccgaaaaatattgatgtcgacgacgttaaccgcctgctggacatcgatcttaacgatccgctcgccgtacgtgatcgggcgatgctggaggtcatgtacggcgcggggctgcgtttatccgaactggttggcctggatataaagcacctcgatctcgataccggagaagtgtgggtaatgggtaaaggcagcaaagagcgacgcctgccgattggccgtaacgcggtgacgtggattgagcactggttggatctgcgcggcctgttcgccagcgatgaagaggcgttattcctgtcgaagctcggcaagcgtatctccgcgcgcaatgtccaaaaacggttcgccgaatggggcataaagcaggggctaaacagccacgtgcatccacataagctgcgccattcgttcgcgacccatatgctggaatcgagcggcgatctgcgcggcgtgcaagagctgctgggtcatgccaacctttccaccacccaaatttatactcatcttgattttcaacatcttgcttcagtgtacgacgcggcgcatccgcgcgctaaacgggggaaataatgcgtttttaccggcctttggggcgtattgccgcgctcacctttgacctggatgataccctttatgataaccgtccggtgattttgcgtactgagcaggaagcgctcgcttttatgcagaattatcacccgtcgctacgttcgtttcaaaacgtcgatttacagcggatacggcaggcggtgcgtgaagcggagccggaaatctatcatgacgttacccgctggcgccatcgcgcgatagagcaggccatgcgggatgcgggattatcggcgcaggaggccattgccggcgcgaatgcggcgatgatgcattttgccaaatggcgcagccagattgaggttccgcaggctacccatgagacgttacagcagcttgcgaaaaaatggccgctggtggcgatcactaacggcaatgcccagccggaactgtttggcctcggcgattactttaagtttgtactgcgcgccggcccggatggacgttccaagccctttagcgacatgtatttcctggcggcggaaaaactgcatgtgccgatcggcgagatcctgcatgtcggcgatgatctgactaccgatgtggctggcgctattcgctgtgggatgcaggcctgctggattaaacctgaaaatgccgacctgatgcggacgcaggacagccgtttactgccgcatatcgaaatttcgcggttggcatctctcacctcgctgatataatcaccagtagttctgtataaattcccagttattctggcggatggcgctatgcttatccgccctacgataagtagccccggtaagcgaagcgccaccgggcgtttttagttttcatgtttttacgcggcggtgccaatggacgtttcttacctgctcgacagccttaatgataaacagcgcgaagcggtggccgcgccacgtagcaacatgctggtgctggcgggcgcgggaagcgggaaaacccgcgtgctggtgcaccgtatcgcctggttactgagcgtagaaaacaactcgccatattccatcatggcggtgacctttaccaataaagcggcggcggaaatgcgccatcgtattggccagttgatggggaccagccagggcggaatgtgggtagggacgttccacggtctggcgcaccgcctgctgcgcgcgcatcatatggacgctaatttgccgcaggatttccagattctcgacagcgaagatcagatgcgtttgcttaaacgcctgattaaggcgatgaatcttgatgagaagcagtggccgccgcgtcaggcgatgtggtacatcaatagccagaaagacgaagggctacgcccgcaccatatccaaagctatggcaacccggtggagcagacctggcagaaggtgtatcaggcctatcaggaagcgtgcgatcgcgctggtctggtggattttgccgagctactgctgcgcgctcatgaactatggctgaacaagccgcacatcctgcaacactatcgcgagcggtttactaacatcctggtggacgaattccaggataccaacaacattcagtacgcctgggttcgtctgctggcgggcgataccggtaaggtgatgattgtcggcgacgatgaccagtcgatctacggctggcgcggggcccaggtagagaacatccagcgcttcctcaatgatttccccggcgcgcagaccattcgtctggagcagaattaccgctcgaccagcaacatccttagcgcggcgaacgctctgattgagaataacaatgggcgtttgggtaaaaagctgtggactgacggcgttgacggcgaaccgatatcgctgtactgcgctttcaacgaactggatgaagcgcgctttgtggttaaccgtatcaaaacctggcaggacaacggcggcgcgcttgcgcaatgcgccattctttatcgcagcaacgcccagtcgcgcgtgctggaagaagcgttattacaggccagtatgccgtaccgcatttacggcggtatgcgcttcttcgaacgccaggagatcaaagatgcgctctcttatctgcgtttgattgccaatcgcaacgatgatgccgcctttgaacgcgtggtgaataccccaacgcgcggtatcggcgaccgcacgctggacgtggtgcgccagacctcgcgcgatcgccagctaacattgtggcaggtgtgccgtgaattgttacaggaaaaagccctggccgggcgtgcggccagcgcgctgcaacgctttatggaactgatcgacgccctggcgcaggaaaccgccgacatgccgctgcatgtgcagactgaccgggtgatcaaagattccggcctgcgcaccatgtatgagcaagaaaaaggcgagaaaggccagacgcgcatcgaaaacttagaggaactggtgacggcaacgcggcagttcagctacaacgacgaagatgaagatttgatgccgttgcaggccttcctctctcacgcggcgctggaagcgggcgaggggcaggcggatacctggcaggatgcggtacagctgatgacgctgcactcggccaaaggcctggagtttccgcaggtgtttatcgtcgggatggaagaggggatgttccccagccagatgtcgctggatgagggcgggcgtttggaagaggagcgtcgtctggcctacgtcggcgttacccgtgccatgcagaaactgacgctaacctatgccgaaactcgccgtctgtatggtaaagaggtttatcatcgcccgtcgcgtttcatcggcgagttgccggaggagtgcgtggaagaggtccgtctgcgcgccaccgtcagtcgtccggtgagccatcaacgaatgggaacgccgctggcggaaaacgacacaggctacaaactcggccaacgcgtgcgccatgcgaagttcggcgagggaactattgtcaacctggagggcagcggcgagcatagccggttgcaggtggcttttcaggggcaagggatcaaatggctggttgccgcgtatgcgaagctggaaacggtttgaccgactctcatagtgccggatggcgcgtcttatccggcctacgcgctggctaacattttgatttgtaggccggataaggcgaagccgccatccggcgatatattgatgttaatattctgaaatcatagataaatactctcactctgctaacctttctgcataaggggaaattattgctttttcgcgtttcgttgcgtgttgacggcaaatttttgctggcgtaacatgcgcccacgattacgctaagaggacattcgccttggacacacccagtagatactggctcattatcctgtcatccaggatcaactcctaaggctatccctttttgctgatagccttagcggttgtcagcgacctttcattttttcccgtcgcgttgagtcaggctgtttaatggtctgaaacccaatttgtttctgtgtgcccatctgaactgtccgatatttttacgcattgggagtcccggtcatgctgagcgcatttcaactggaaaaaaaccgactgacccggctggaagtcgaggagtcacaaagcctgattgatgccgtatgggtcgatttggtcgaaccggacgacgacgagcgattgcgcgtacaatctgagctgggccagagtctggcgacgcgtcctgaactggaagatatcgaagcatccgcgcgcttctttgaagacgaagacggactgcatatccactccttcttcttcttcgaagatgcggaagatcatgccggtaactctacggtggcattcactattcgcgatggccgtctgtttacgctgcgtgaacgcgaactgcccgccttccgtttgtatcgtatgcgcgcccgcagccaggcgatggtcgacggtaatgcttatgaattactgctcgatctgttcgaaactaaaattgaacagttggcggatgaaatcgaaaacatctacagcgatctggaaaaactgagccgcgtcattatggaagggcatcagggcgatgaatacgacgaagcgctctccacgctggcggaactggaagatatcggctggaaggtacgcctgtgtctgatggatacccaacgcgcgctgaacttcctggtgcgcaaggcgcgcttaccgggcggacagctggagcaggcgcgtgagatcctgcgcgatatcgaatctctgctgccgcacaatgaatcgctgttccagaaggtgaacttcctgatgcaggcggcgatgggtttcatcaacatcgagcagaaccgtattatcaaaatcttctcggtggtttccgtggtgttcctgccgccgacgctggtcgcttccagctatgggatgaacttcgagtttatgccggaactgaagtggagctttggttatccaggcgcgattatctttatgattctggcggggcttgcgccgtatttgtactttaagcgcaagaactggctgtaagacattaaggccagggtgattcagctgcggctgaaccaccctgaaaagttacaggctccaggtattgatacctttaacctctttttcatagaaccacttatttgtattgacgccgacataagctgcgacaacaagtccaagtatgttaacgccgattaatgctccaataaatattgcaacgatccctaataaaataactataattgcttttttccacagacccagtacaaacaaataaatccatgagaagaaaaaggcaataaagtttatttgaatagtcaaccgttgtcggggctttaatgctttaaatgcctgtttatattctgggcttactttccaaaatccagggaaaccatgttgatcgtaaaatgaaaaacggtatttccatttttcagatagcgaaccatcattaatataatccttgtccatgtaaactccattaaattacttgttgagtgaattcgaatccgggggggccagaagtagcagagaaaaggttgcaaaataccagattagaaaaagaggcataccaaagccatcgcaagcgaaatcttcagcaaccattatcacgaaggaggcaatatagattacaagcgtaccccatacatagaattttatatattcaaagccactgtctctgaatcgctgacagtttaaattaatgacgagataatgtagtaaaattgtgaataaaattgccagtatcacaaagcttaaatataataaaaccccaaccaaaatggaaaatattatatttattagcgcgaatgataataaataacgacatctggaaacacatctctcagatgaaggaataaaaacacttaacattaatttcacatccatatgttgggttacgtcgttagcatgacaatatgctaccccccttacaaggggaggcatattttttcagattatatttagaataatagtcgcgttattttttacgctgcgtataaatcgcatccatcacgaaaatcgccagcgcgacccagataaacgcaaatgtcaccatcttatccgcgcccggcacttcgccataaaacgtcaccgccagtaaaaacatcagcgttgggccgatatactggaaaaagcccagtgtagaaagacgcagacgcgtagccgctccggtgaagcacagcagcggaatcgtagtgaccacacccgccgccattaacagcaagttcaacgatagtgcgttttgccccatatggctggtagggctatcggcgatgccaaacagataaatcgcggcgaccggcaacagccatagcgtttcaaccagcatacccgtctgcgcttcaacggcgatcttcttacgcaccaggccgtaaaacgcaaaactaaacgccagccccagcgcgataatcggcagcgagccaaaggtccagagttgcaccagcacgccgcacaccgccagaatcaccgccagccactgcattcgacggaagcgttcgccaagaaaaatcatccccagcaagatgttaaccagcggattaatgaaataacccaggctggcctccagcatatggtgattatttaccgcccaaatgaacaatagccagttaccgccgaccagtacggcggacagggccagcaggaaaatcttctttggcgttttcagtaagcgcttaacctgtcgccactgccggctgacgctaagcagcgccaccataaagaaaaatgaccaaatcacgcggtgcgtcaggatctcatctgcgggaacgtaatagatcagcttgaaatacgcgggggcgatcccccaaataaaataggcggcaagagcgagtaatacgccctgccgtgtttgttttgcgtccatccggaaaactcgtatctgaagtgtaacaacagtttacctgcttttatcccaccatataagtagcggtggcgctggcgatgtacagctgatcttcattgtgtaattccacgcgggcgacggccactttattccctgcgcgcagcaggctactggtggccgtaaagcggttgcctctgcccggacgcaggtaatcgacgcgcaggtcaatcgttcccatccgcgacaggcgctggcgtagttcatcttcgctgatggtttcgtggcgagttagcgtgctgccgacgcataccagtccggcggcgacatccagcgcagaggcgatcacgccgccgtgtaaaatgctttgcgcccagttgccgaccatcatcggctggttgttgaaggccagttgggcgaacgctttttcatagcgttccagctccagccctaacgcccgattaaacggcatgtggtagacaaacatttcacccactaatttcagagcttgttcagcggtaagtacagcggacatagattcctgacacctcattagttaatgaaatgttgatattatgcttcttaattgttgttttctactttaagaagggataactaacggctatgtgtgtaaatatgtaaaaatggttggcagagaatgattcaagctgaaaatacttcgtcaggagaacgtcaagaatgcgggcgattttgagagggttgttgccagccacgctactgccattagcggcatatgcacaagaagctacgataaaagaggttcatgatgcgcctgcagtacggggaagtatcatcgctaacatgctacaggagcatgataacccttttacgctttacccttatgacacgaactacttgatctacacgaacaccagcgatctgaacaaagaggccataagtacctacaactggtctgaaaacgcacgtaaagatgaagtgaaatttcagttgagcctggcgtttccgctgtggcgcggaatactggggccgaactcggtactgggcgcttcctatacgcagaaatcctggtggcagctttccaacagtaaagagtcttcgccgtttcgcgaaaccaactacgaaccgcagctttttcttggttttgctaccgattatcgctttgccggctggacgctgcgcgacgtagagatgggctacaaccatgactctaacggacgttcggaccccacctcgcgtagctggaaccgtctgtatacccgtctgatggccgaaaacggtaactggctggtagaggtcaaaccgtggtacgtgattggcagtaccgatgataatccggacatcaccaaatatatgggttattaccagcttaaaatcggttatcacctgggcgaggcggtattaagcgccaaaggccagtacaactggaatacaggctacggcggcgcggaagttggattaagctatccggtcactaaacatgtccggctttatacccaggtgtacagcggctatggcgaatcgctgatcgactataattttaatcagacacgtgtcggcgtcggcgtgatgcttaacgatatcttctgattggattgtgttttaaacattgcagtttctctcgcaggcgctgaaaatagcgcctgttttgatttatggtgaacggggttaatgtggcgcaggcggaagtgttgaatctggaatcaggggccaaacaggttttgcaggaaacctttggctaccaacagtttcgcccgggtcaggaagcgattattgatactgcgctctccggtcgcgactgtctggtcgtcatgcccaccggcggcggcaaatctctgtgctatcaaatccccgcgttgttgctggacgggttgactgtcgtcgtttcgccattaatctcgttgatgaaagaccaggtcgatcagctactggcgaacggtgtggcggcggcgtgcctgaactccactcaaagccgcgagcagcagcttgaggtgatggcggggtgccgtaccggacagattcgtctgctgtatattgcgccggaacgcctgatgctggacaactttcttgatcatctggcgcactggaatccggtattgctggcggtggatgaagcgcactgtatctcgcaatggggacatgatttccgtccggaatatgcggcgctcggtcagcttcgccagcgttttcccgctttgccgtttatggcattgaccgccaccgccgacgacaccacgcgccaggatattattcgtctgcttgggcttaacgatccgttaatccagattagtagctttgaccgaccgaatatccgctacatgctgatggagaagtttaagccgctcgaccagttaatgcgctatgttcaggagcaacgcggcaaatcgggtatcatctactgtaacagccgggcgaaagtggaagataccgctgcgcgcttgcaaagtcgcggcattagcgcggcggcctatcatgcggggctggaaaacgctattcgcgtcgatgtgcaggaaaaatttcagcgcgacgatctgcaaatcgtggtggcgaccgtcgcttttggaatgggcataaacaaacctaacgtacgtttcgtcgtgcatttcgatatcccgcgcaatattgaatcctactatcaggaaacgggccgcgccgggcgcgacggactgcctgcggaagccatgctattttacgatccggctgatatggcctggctacgtcgttgtctggaagagaaaccagccggacagcttcaggatattgaacggcataaactgaatgcgatgggcgcttttgctgaagcgcaaacctgccgccgcctggtattgcttaattactttggcgaaggccgacaagaaccgtgcggcaactgcgatatctgtctcgatccgcccaaacaatatgatggcttaaacgatgcccagattgcgctttctaccattggtcgggttaaccagcgttttggcatgggctacgttgtcgaggtgatccgcggcgcgaataaccaacgcatccgcgatttcggtcatgacaaactcaaggtttatggcatgggacgcgaaaagagccatgagcactgggtgagcgtgattcgccagctcattcatctggggctggtaatgcaaaatattgcgcagcactccgcattacagttgacggatgccgcgcgtccggtactccgtggagacgttccgctaaagcttgcggtgccgcgcatcgtcgccctcaaaccccgcgtgatgcagaaatcgttcggcggtaattacgatcgcaaattgttcgctaagttgcgcaagctgcgtaaagctatcgctgatgaagagaatatcccgccgtatgtggtctttaacgacgccacgttgatagaaatggcggaacagatgccggtttccgccagcgagatgttaagcgttaacggggttgggatgcgcaaactggagcgcttcgggaaagaatttatggcgctcatccgcgcgcatgtcgatggtgatgacgaagagtagtcagcccggcaaaaaagtgccaggatggtgactcactgaactatttccccgcgagccatttttatgatgatgctatttttcaccgtggcaatggtgcacatcgttgcgctaatgagccccggccccgactttttcttcgtgtctcaaactgctgtcagccgttcgcgtaaagaagcgatgatgggcgtactgggcatcacctgcggcgtgatggtatgggcgggcgtggcgctgcttggcctgcatctcatcatcgaaaaaatggcctggctgcatacgatcattatggtaggcggcggcctgtacctgtgctggatgggctatcagatgctgcgcggcgcgctgaaaaaacaggatgcggcggcgtcttctccgcacattgaactggcgcagagcgggcgcagctttctcaaagggctgctgaccaatctgtcgaatcctaaagcgattatctattttggttccgttttttcactttttgtcggcgataacgtcggcgctgcggcgcgctggggtattttcgcgttaatcaccctggaaacgctggcctggtttaccgtagtcgccagcctgttcgcgctgccgaaaatgcgccgtggctatcagcgtctggcgaaatggattgatggctttgccggcgctctgtttgcgggctttggtattcacctgattatttcgcgctaatttacctccgggccggataaacatcatccggcacgactatcacgcgtgtcttgccgacgccaggagcgcgcctaccagcataaacaacgaaccaaacgctttattcagcgccttcatctgctttggtcctttaatccaggcggcaatgcgctgcgccagtgtggcgtaaccggtcatcacaaccatatccaccacaatcgtggtgacgccgagaatgaggtactgcgccagttgcggttgctgcggcatgatgaattgcggaaacagggcggcaagaaagacaatacttttgggattggttagattgacaaatatcgcccgtttgaacagccgaccccgcgattgcgtctgggcgagggtatgcagatcgatagcgcctgcggcgcgccattgctggatacccagccagataagataagccgcgccagcccatttcagaatttcaaaagcgaggagcgagcgcgaaaagagcgtacccagtccgacgcccaccagtacgatatgtatccccagcccggtctggagtccggcgatagaagccactgcgccacgatatccatggttgatagacgtcgtcatggtattgatggcgcctgaacccggagaaagactcagcagagttgaggtcagtagataggcgaaccaccattcaaaggtcatgcgaaactccctggttgtctgtttttgtgccacaatacgctactgccgctgtgttgtgtcaggcacgacgcaaaaaacgattttacctggtaaacgaggccgaaaacccgatgtttcagcagcaaaatgactgggaaacaagagaaaatgcgtttgccgcttttgctatggggccgctgaccgatttctggcgtcagcgggaagaggcggagtttatcggcgtgggtaacattccggtgcgctttgtccgttttcgaaatgattccaacgatcggacgatcgtcatttgtcctggccgcattgagagttatgtaaaatacgctgaactggcgtatgacctttttcatctcggttttgatatcttcatcatcgaccaccgtggtcaagggcgctccgggcggatgttatcggacccgcatcggggtcatgtcgatcattttaacgattatgttgaggacttagcggcgttctggcagcaggaaattgagccggggccgtggcgtaagcgttatatcctggcgcactcaatggggggcgcgatagccaccctgttcctgcaacgccatcgtgtgcggtgcgacgctattgcgctcaccgcgccgatgtttggtattgtgatacgcttgccttcctttatggtgcgccatattctcgactgggccgaagggcaccagcgtatccgtgaagattacgctattggtaccggtcagtggcgggcgttgccgtttgggatgaatgcgctgacccacagccgccagcgttatcagcgcaacttacgattttatgccgacgagccgcagctgcgcgttggcggccccacctggcattgggtacgcgaaggcattctggcgggtgagcaggtactggctggggcgagcgatgacacgacgcctacgctactgattcaggcggaagaagagcgggtagtggataaccgcacccacgatcgtttttgtgaaattcgcgccgcggcgggatacccttgtgaagggggaaaaccgctggttatcaaaggcgcgtaccatgagatcctttttgaaaaggacgccatgcgctcagtcgcgcttaacgccattgttgaatttttcaacaagcctaatttatccagcggaaatcgctttgcttagaggttaaattttattatgtatcaggttgttgcgtctgatttagatggcacgctgctctcccccgaccatacgttgtccccttatgccaaagagactctgaagctgttgaccgcacgcggcatccattttgtctttgccactggtcgtcatcatgtcgatgtagggcaaatccgcgataatcttgaaatcaagtcttacatgatcacctccaacggcgcgcgagtgcacgataccgacgggaatttggtttttacgcataatctggacagcgacattgccagcgacctgttcggggtggtgaatgcgaacccggacatcgtgactaacgtttatcgcgacgacgaatggtttatgaatcgtcatcgccccgatgaaatgcgttttttcaaagaggcggtatttaactactcgctgtttgagcctgcgctgctggagccggagggcgtcagcaaagtgtttttcaccagcgacactcatgaaaagttgttgccgctggagcaggcgattaacgcgcgctggggcgatcgggtaaacgtgagcttctctacgctaacctgtctggaagtgatggcgggcggagtgtcgaaaggtcatgcgctggaagcggtcgctcaggcgatggggtacagtctgaaagagtgtatcgcctttggcgacggaatgaacgacgctgaaatgctcacgatggcgggcaaaggctgcatcatgggcaatgcgcaccagcgtctgaaagacctgtatcccgaacttgaggtgatcggcatcaacgcggataacgccgtgccgcattacctgcgcgatcttttcttacgctgatgtgattgtttgttagttgaccagttgtcaacttcactctccgctacaatgggtgttccctgttttaagagacatccattgtggcgctactcatcattaccactatcctgtgggctttctcctttagtttatttggcgagtatcttgccgggcatgtcgatagctatttcgcggtgctgatacgcgttgggctggcggcgctcgtttttctgccgtttttgcgtactcgcgggcacaacctaaaaaccatcagcctgtatatgctggtgggggcgatgcagcttggcatcatgtatatgttgagcttccatgcttacctctacctgaccgtatccgaactgctgttgtttaccgttctgacgccgctctatatcacgctgatttacgatgtgatgagtcagcgtcgtttgcgctggggctatgcatttagcgcgttgctggcggtgattggcgccgggattattcgctacgatcgcgtgaccgaccatttttgggtcggtttgctcctggtgcagctttctaatatcagtttcgctatcggaatggtggggtataaacgtctgatggagacccgtcccatgccgcagcacaacgcctttgcgtggttctatctgggggcgtttttggtggcggcggtggcgtggtcgctgttggggaacgcgcaaaagctgccggaaaccacgctgcaatggagcattctggtgtttctcggcgtggtggcgtcaggcattggctactttatgtggaactatggcgctacccaggtagacgccgggacgctgggtatcatgaataacatgcatgttcccgcaggactgctggttaatcttgccatctggcatcagcagccccactggccaagctttattacaggcgcggctgtgatcctggcttcgctgtgggtgcatcgaaaatgggtcgctccgcgctccgcacaaacggcagatgatcgcaggcgtgatcccgcgtcgagcgaataaacgcctcggtcaccgcctgacgctggtcgccgtcgcgcacggcggcatacaggcggctccacagaccatctccaagggttttggtcaccaccagaccctggcgctcaacgctttccaccacccagtgcggcagggcggcaatacccattctggccgccaccatctgaatcagcagtagcgtattatccacgcttttcagcagcggactgatacccgccggttgcaggaaatgtcgccagacatccagtcggctgcgctgcaccgggtaaatcaacagcgtttcgctggctaaatcttccggcgtaatctgcgttttgctggccagcggatggtcgggcgccagcaccagtcggacttcaaaatcaaacatcggcgaataatgcagtccgctacgcggcaaaatatccgacgtcatcaccaaatccagctcgccttgttgcaaggccggttgcggatcaaaagtgacgccggaggtgaaatccatttctacctgcggccagcttgcacggaagttttccagcgccggggtcagccactgaatacagctatgacattcaatagcgatgcgcagacgagtttgctgcggttcgttgcacgcctgcagcgcacggctgatttgcggcagcacttggtttgccagttgcagcagaacttccccctgcggcgtaaagcgcagcggctggcttttacgcacgaacaggcggaagccaaggcgttgttccagatcgctgaactgatgagacagagcggattgggtctggtgcagcaccgccgccgcggcagccagcgatccactattccgcaatgcctggagtgttttcagatgtttaatttcgatcatgaaagtccttcacttcgccatgaacaaattgcgcttgaggaatatacagtacctttacattatggatgtgtaaacatccagacgtctaaaactcgtcatatttcgacttgcagatgcgttggcttccttgcttaccccagtcacttacttcagtaagctcctggggatgcgctgtgtcgccgccttcctgcaagccgaactatttagagttttactttcagattcaataaaataagagaggaagtaaaatgacaatattgactcatacccttggttttcctcgcgttggcctgcgtcgcgagttgaaaaaagcgcaagagagctactgggcggggaacacaacgcgtgaagcgttactggcggtggggcgcgaactgcgcgcgcgtcactgggagcagcagaaacaagcgggtattgacctgttaccggtaggcgactttgcctggtacgaccatgttctgaccaccagcctgctgttaggcaatgtgccggctcgtcatcagaacaacgacggttccgtggacatcgacactctgttccgcattggccgcggtcgcgcgccaaccggcgaaccggcggcggcagcggaaatgaccaaatggtttaatactaactatcactacatagtaccggagttcagcaaaggccagcagttcagactcacctggacacagttgctggaggaagtggacgaagcgctggcgctggggcataagatcaaacccgtactgctggggcctgtcacgtatctgtggctgggtaaagtgaaaggcgagccgtttgaccgcctgacgttgctgaaagacattttgccggtgtatcagcacgtactggctgaactggcaaaacgtggtattgagtgggtccaaattgatgagccagcgctggtgctggaactgccgcaggcgtggctggatgccttcaaaccggcttacgacgcgctcgccggccaggtgaagctgttgctgacgacctattttgaaggcgtgacgccaaacttggacactattatcgcgctaccggtacaggggctacatgttgacctcattcatggcaaagatgatgtagcggaactgcatcaacgtctgccggtcgactggctgctctccgcaggcttgattaacgggcgtaatgtctggcgcgccgatttgaccgaaaaatacgcgcagattaacgccattgtgggcaaacgcgcgctgtgggtagcatcctcctgctctttgctgcacagcccgatcgatctcagcgtcgaaacgcgtctggatacggaagttaaaagctggtttgcctttgcgctgcaaaaatgcggtgaactggcgttgctgcgcgatgcgctgaacagcggcgaaacggcggcgcttgaggaatggagcgcaccgattcaggctcgtcgtcactcccgccgcgtacataatgccgcggtagaaaaacgcctggcggcgatcaccgcgcaggacagccagcgtgagaatccgtatgaggtgcgcgctgaagcgcaacgcgcccgctttaaacttcccgcctggccgacgacgactatcggttcgtttccgcaaaccacggagattcgcggtctgcgtctggacttcaaaaagggcaacctcgacgcgaaccactaccgcaccggcatcgccgaacatatcaaacaggctatcatcgagcaggagcgtttagggctggatgtgctggtacacggcgaagccgagcgaaacgacatggtggaatacttcggcgagcatctggacggcttcgtctttacccagaatggttgggtgcaaagctatggctcccgctgtgtgaaaccgccggtagtgattggcgatatcagccgtccggcaccgattaccgtggagtgggcgaaatatgcccagtcgctgaccgacaagccggtaaaagggatgttgaccggcccggtgactattctttgctggtcattcccccgcgaagacgtgacccgcgaaacgattgcgaaacagattgcgctggcgctgcgtgatgaagtcgcggatctggaggcggcggggatcgggattattcagattgacgaaccggcgctgcgtgaaggtttaccgctgcgtcgcagcgactgggacgcctatctggaatggggtgtggaagccttccgcatcaacgcggcggtggcgaaggatgaaacccagatccacacccacatgtgttactgcgagttcaacgacattatggattcgatcgccgcgctggacgcggatgtgatcaccattgagacctcccgctcggatatggagttgctggagtcgttcgaagcgttcgactacccgaacgaaatcgggccgggcgtgtacgatattcactcgccgaacgtgccgagcgtcgagtggattgaagccctgctgaagaaggcggcacaacgtattccggcacaacgcctgtgggtgaatccggactgcggtctgaaaactcgcggttggccggaaacccgcgcggcgttagcgaacatggtcaaagcggcgcacaatctgcgtcaggcgaaataacccatcctggccgctgcgtttatccggcagcaatgcggcgctaccctttgacgggtagcgcccgtgcctgacctgattaacagcgcctctatctcctcttttttctcatttccctttttcttattttccgcgctgtctttttcaggatctggctatttggcgatcttgataataaaaaggttctccgtatgaatgacaaccaggcggatagcgtccccggaagcagagcggcggcttttattgcctcgcagatcgtttttcctgtcatgatcgcccagcgctctcatagcacaaaacgaggttttccattctgttatgttccctggcgacgataaacgtcgcattgtctcatggcgctggtgaaccttattttttaacggagatgtctgacatggcggtagcaggttgtcacgtaatggccaaacccggcggcgcgatctgcaatattgattgcacatattgcttctatcttgaaaaagaggcgctgtacccggaacgcaataaaaactggcggatgtcggacgagacgctggaacaatttatacgccagcatattgccgcgcagagtggcgaccgcattgactttgcctggcagggcggcgaaccgaccatgatggggctaccgtttttccgtcgggttgtcgcattatgtgaaaagtacggcgatgggcgaaaaatcactcatgcgttgcagacgaacggcatcctggtgaatgacgagtgggcgcgctttttcgctgaacagcattttctcatcggtctctctatcgacggcccggcgtcgttacacaaccactatcggtttaatcgcgctggaaaaggaactcatgaacaggtcgtcgcagccatggcgcggcttaaagcgcaccatgtcgactttaataccttaaccgtcgtgggaaaacataacgtcggtcatgcagcagacgtctacgaatttcttctggcggcgggatcgcgttttattcagtttatcccgctggtagagcgaatgagcaccgataactcatcggtacttaatctggtgatgcccggcgaaagcgcggcgacgctggcgccatggacggtaccgtcgtggcaatatggcgaatttctcaaccagatctttgatatctgggttcgtcgcgacgtagaccgcgtctatgtgcagatgtttgacgtggcgttagccgcctggacggcgcagcagccggtactgtgtgtacattccgagacttgtggacatgccttcgcgttggagtcgaacggcgatctctacaactgcgaccactttgtctacccggagcatctgctgggaaatatccaccagcacagcatcaaagccttaaataatagcgagcgggctattgcctttggcgaggccaagcgggagaccctgaccgccgattgtcgtcgctgtgactaccgctttgtatgtcatggcggctgtcctaagcatcgctttgccgtctcgccgtctggtcatcctgcgcataattacttgtgtgcgggctataagcattttttccagcacgttacgccgtatatgaatgtctggcgggagctgctggcgcaaggctatccgatggcatcgatcatgcgctggctggcgcaggacgcgcgtaaagacacaggagccgtcagtcgtaaccatccctgtccctgcggcagcggcaaaaaatataaaaaatgctgtggtaaagcatagctaacgtggcgatgacgctttgttgagcctacaccgactccggtctcgtaggcccaacaaacatcgtaatgcgctgtggttagccttttttcccaccgtactgcgcgaaccattccagcattctttgccagccgtctttcgctgaggcttcgtggtagcccggacgataatcggcattaaacgcgtgccctgcatcgggatagaccacgatttccgccttcgcattagcggcgcgtagcgcctgacgcatggtttccacgctctcctgtggaatactggtatcctgcccgccgtataaacccagtaccggcgcgttaagatcggtggcgatatcaacgggatgcttcggcgaattgagtgacgtgtcgcccaccagcttgccgtaccatgctaccgccgcttttaactgtgggttgtgcgcggcgtacagccaggtaatccggcctccccaacaaaaaccggtgatcatcagccgatgcgcatccccgccgttgcgcgaagcccaactggcgacgtgatccaggtcggcaaggacttgcgaatcgggtactttagccaccagcccgctcaataatgtgggtatatcggcgaaatcattggggtcgccttcgcggaaatagagctccggcgcgatagcgagatagccttccagcgccagtcgtcggcaaatatcgcgaatgtgttcatgtacgccaaaaatttcctgtaccacaatgaccaccggcagcgcgccgtcgctcgcttttggtctggcgtaataggcgggcatatcgtcgccctgagagggaatcgacgttatccccgcgctaatggccccatcaggcgtatgaatcatcgtaggggcaagtggggaggctgcaggtgcaaagccggatggatgtgtcgttgtcatggtattctccgtacccttaaaaaatagcgcaatcttaactatagacagtgtgtaacaaaccacattgccttaaagcggctatcttttgtgcaatgcctggcgatattgattatttattgtgatgaacatcactttttaatggtaagcgagtgcaattgttttacgtcatagtgatggctgtcacgaaaatatctttatgccttaggtaaagtgtctctttgcttcttctgacaaacccgattcacagaggagttttatatgtccaagtctgatgtttttcatctcggcctcaccaaaaacgatttacaaggggcccagctcgccatcgtccctggcgatcctgagcgtgtggaaaagatcgccgcgctgatggataagccggttaagctggcatctcaccgcgaattcacctcctggcgcgctgagctggatggcaaagcagttatcgtttgctctaccggtatcggtggcccgtctacctctattgccgtggaagaactggcgcaactgggtattcgtaccttcttgcgtatcggcaccacgggggctattcagccgcacattaacgtcggcgacgttctggtaacgaccgcatccgtacgtctggatggggcgagcctgcattttgcgccgatggaattcccggcggttgccgactttgcctgcaccactgcgctggttgaagccgcgaaatcgattggcgccacgactcacgttggcgtaaccgcctcttccgacactttctatccgggtcaggaacgttacgacacctattctggccgcgttgttcgtcgcttcaaaggctctatggaagagtggcaggcgatgggcgtgatgaactacgaaatggaatccgctacgctgttaaccatgtgcgcaagccagggtttacgcgcaggtatggtggcgggcgttatcgtcaaccgtacccaacaagagattccgaatgcggaaacgatgaaacaaactgaaagccacgcggtgaaaatcgtcgtggaagcggcccgtcgtctgctgtaattctcctctcttttgcaaaggccgacgcgttcggccttttctttttgcgtggcgcctcgcaggaaatcccttttaaactggacgtttatacagcacaattctattttgtgcaggacagtgtggttccaggagaggtgttgtggatattactcttatgataagcgccgtcgtggcgctggcggctggggcggtgattggctggctggcgacgaaagcgcacgccgatcaaatccgcgccgatcttatcgaagaacggcgtgagctggatatcgaacttagcgcggcccggcagcaattagcgcaagaagcgcactggcgcagtgaatgcgagttacttaataacgaactgcgtagcctgcacagtattaatacctctctggaagccgatctgcgtgaagtcacgacccgtctggaagcgactcagcaacacgcggaagacaaaatccgtcagatgatcaacagcgaacagcgtttaagcgagcagtttgaaaatctggcgaaccgtatctttgaacacagtaatcgtcgcgtagacgaacaaaaccgacaaagcctgaatagcctgctgacgccgctgcgtgagcaactggacggttttcgccgccaggttcaggagagttttggcaaagaagcgcaggagcggcatacgctggcgcacgaaattcgtaatttgcagcagcttaacgcgcaaatggcgcaggaagcgatcaacctgacgcgcgccctgaaaggggacaataaggcgcaaggaaactggggcgaagttgtgctggcgcgggtgctggaggcatccggactgcgtgaaggctacgaatacgaaacccaggtcagtattgagaacgatgcgcgctcgcggatgcagccggatgtcatcgtccgcttgccgcagggcaaagatgtggtcatcgacgctaaaatgacgttggtcgcctacgagcgttactttaacgctgaagatgactacacgcgcgaggccgctttacaagagcacatcgcctcggtgcgcaatcatattcgcttactggggcgtaaagactaccagcagcttcccggcctccgctcgctggactatgttctgatgtttatccccgtagaacccgctttcctgctggcgttagataaacagcccgaactgataaccgaggcgctgaaaaataacattatgctggtaagccccacgacgctgctggtggcgttacggacaatcgccaacctgtggcgctatgaacaccagagccgcaatgcgcagcacatcgcagacagagccagtaagctctacgataaaatgcggttgttcgttgatgatatgtcagcgatcggtcagagtctggataaagcgcaggataactaccgccaggcgatgaaaaaacttgcgtcggggcgtggcaacgttttggcgcaggcggaggccttccgggggctaggcgtggaaatcaaacgcgagattaatccggatttagcggaacaggccgttacgcaagatgaagaatatcgtttacgatcgatccctgaagggcggcaggatgaacattatcccaatgatgaacgggtgaagcagcagttaagttaacccatacggagtagtttagtcctggcgcagagtagggcaaattggcccaatctgttacacttcttgaacatttttatcgataagcaggcactgagatggtggaagattcacaagaaacgacgcactttggctttcagaccgtcgctaaagagcagaaagctgacatggtggcccacgtttttcattctgtggcgtcaaagtacgatgtgatgaatgacttaatgtcatttggcattcatcgtttgtggaagcgcttcaccattgattgcagtggcgtgcgtcgtggacaaaccgttctcgatttagcgggtggtacgggcgatcttaccgcgaaattttcacgtatggtcggggaaactggcaaagttatcctggcggatattaatgattccatgctcaaaatggggcgtgagaagctgcgtaatatcggcgtgatcggcaacgtagagtatgtgcaggcgaatgccgaagctctgcctttccctgataatacgtttgattgcattaccatttcgtttggtttgcgcaatgtaacggaaaaagaaaaagcgctgcggtcaatgttccgtgtgttgaaacccggcggacgtttactggtgcttgaattttccaagcctatcattgagccgctgagtaaagcgtatgacgcctattctttccatattttaccgcgtattggctcgatggtcgcaaacgatgcggatagctatcggtatctcgcggaatccatccgtatgcatcccgatcaggataccttaaaagccatgatgcaggacgccggatttgagagcgtggattattacaatctgacggcgggcgttgtggcattgcaccgtggttataaattctaggagggtggaatgccttttaaacccttagtgaccgcaggaattgaaggtctcctcaatacgtttctgtatcgttcgccagcgctgaaatcagccagaacgcgcttacagggaaaagtactgtgtgtgaaactaaagggattttcgatgccattagtcctggtattcagtgaacgccaggttgatgtgctgggggcatgggaaggcgaagcggactgtacggtaatcactcaagctagcgttttgccaaaactacgcgatcgtcagcagttggccacgcttattcgcagcggcgaactggaagtgcagggcgatattcaggtcgtgcaaaattttgtggcgctcgccgatctcgccgaattcgatcctgcggagctgttggcgccatacacgggtgatattgcggcggaaagtatcggtaaggtcgtgcgtggcggggctaaattcctgcgccacgggtttcaacgccagcagcgttatgccgctgaagcgatcactgaagagtggcgtatggcgcctggcccgctggaagtcgcatggtttgccgaagaaaccgcggctgttgagcgcgccgtagattctctgaccacacggctggaaaaactggaggccaaatgacgccaggtgaagtacggcgcctatatttcatcatccgcacgtttttaagctacggccttgatgaactcatcccccgaatgcgtcttacactgccactccgattatggcgctattcgctgttctggatgccaaaccggcataaagataaattgctgggtgaacgattaagactggcgttgcaagagctgggaccggtctggatcaaatttggtcagatgctctccacgcgccgtgacctgttcccgccgcaaatcgccgatcagctcgctttgctccaggataaagtcgcgccattcgatggtcggctggcgaaagcccagattgaagaggcgatgggggggctacctgtcgaagcctggtttgacgactttgatatccagcctttagcgtcggcgtcaatcgcccaggtacataccgcgcgattgaaatcaaacggtaaagaagtggttattaaggtcattcgcccggatattttgccggtaattcaggcagacctgaaactgatttatcgccttgctcgctgggtaccacgcctgttgccggatgggcgtcgtctgcgcccgacggaagtggtgcgtgagtatgagaaaacgctgatcgatgagctgaatctgctgcgggaatcggccaacgcgattcagttacgccgcaattttgaaaatagtcccatgctgtatatcccggaggtgtactccgattactgtagccagaacatgatggtgatggagcggatatacggcattcctgtttcggatgtggcggcgctggaaaagaacggcaccaacatgaaactgctggcggaacgcggggttaaagttttcttcacccaggttttccgcgacagctttttccatgcggacatgcatccgggaaatatttttgtcagccatgaacaccctgaaaacccgcaatatatcggcattgactgcggtatcgtcgggtcgctaaacaaagaagataagcgttatctggctgaaaactttatcgcgttttttaatcgcgattaccgaaaggtggcagaactgcatgtcgattcaggctgggttccgccagataccaacgttgaagattttgagtttgccatccgcaccgtctgtgaacctatctttgaaaagccgctcgcggaaatctcgtttggtcatgtgttgttaaaccttttcaatacagcgcgtcgatttaacatggaagtccagccgcaactggtgttgttgcagaaaacattattgtatgttgaaggggttgggcggcaactttatcctcagcttgatttgtggaaaacggcgaagccgtttcttgagtcctggatcaaagatcaggtgggtattccggctctcacgcgggctcttaaagaaaaagcgccgttctgggtcgaaaaaatgccagaaatacctgaactggtgtacgacagtttgcgccagggcaaatatttacagcacagtgttgataagattgcgcgcgagttacaggtaaaccatgtgcgccaaagtcagtctcgttatttattgggaattggcgcaacgctgttactgagcgggtcattcttactcgtcaaccgccctgaatggggattgatgcctggctggctcatggtcggcggcgtagttgtctggctggttggctggcgtaaaactcgttgagattttttatcgctcaacgccggttgtgtcacgcaggtacatattatcactcgaggcaatactcaggccgcaagtcaatgtcgtcccggtcgtatgtaaaagtatgtgaatagggcgggcgaaagcggctaacaaagaggcagcgtgaaggataatgtgtataatgcggccctaataattcatcatctatcacagaggaacatgtatgggtggtatcagtatttggcagttgttgattgttgccgttatcgtcgtactgctgttcggcaccaaaaaactcggttccatcggttccgatcttggcgcgtctatcaaaggctttaaaaaggccatgagcgatgatgatgccaaacaggataaaaccagtcaggacgctgattttaccgctaaatctatcgcggataagcaaggcgaagcgaaaaaggaagacgctaaaagccaagataaagagcaggtataatccgtgtttgatatcggttttagcgaactgctgttagtgttcgttatcggcctcattgtgttggggccgcaacgattgccagtagcggtaaaaacggtagcgggctggattcgcgcgttgcggtcccttgcgacaacggttcagaatgaactgactcaggaactgaaacttcaggagttccaggacagtctgaaaaaagtcgaaaaggcgagcctggaaaatctgactcccgaactgaaagcatctatggatgaactgcgtcaggcggcggagtcgatgaaacgcacctacagcgctaacgatcccgaacaagcgagcgatgaagcgcataccatccataatccggtggtaaaagggaacgaaacgcagcatgagggcgtcacccctgccgccgctgaaacacaggcgagcgcgccggaacaaaagccggagcccgttaaagctaacgtgcctgagtcgacggaaaccgcttccgtagccacgatagacgccgagaagaaatccgctgcgcctgttgtcgaatcttccccctcgtcgagtgataaaccgtaaacatggctgtagaagatactcaaccgcttatcacgcatctgatcgagttgcgtaagcgcctgctaaactgcatcgtcgcagtacttctgatttttctggcgttaatttatttcgccaatgatatttatcatttagtcgccgcaccgctgattaaacagatgccgcaaggggcgacaatgattgcgacggatgtggcgtcgccgttttttacgcctatcaaactcaccttcatggtgtctttgatcttatccgcgcctgtcattttgtaccaggtttgggcctttatcgccccggcgctgtataagcatgagcgtcgtctggtcgtacctctgctggtatccagctcgctgcttttctatattggtatggccttcgcctattttgtcgtattccctttggcctttggtttcctgacgcatacggcgccggaaggggtacaggtttcgacagatatcgccagctatcttagctttgtcatggcgctttttatggcctttggcgtagcctttgaagtgccggtggcgattgtgttgctgtgctggatgggcatcaccacgccagaagatttgcgtaaaaaacggccttatatcctggtcggggcattcattgtgggaatgctgcttacgccgccagatgttttctcgcaaacgttgctggcgataccgatgtactgcctgtttgaaattggcgttttctgctcacgcttttatgtcggtaagcgacggacgcgcgacgaagataacgaggccgaaaccgaaaaggccgagcacactgaagactaaacacaaccgcccgccagggcggttgtcatatgggggcaagcatgtttgatattggcgttaatttaaccagtagccagtttgcaaaagatcgtgatgatgtggtcgcccgtgcgtttgcggcgggagtaaaaggtatgctactgaccggaacgaacatccatgaaagtcagcaggcgttaaaactggcgcggcgctacccccattgttggtcgacggctggcgtccatccccatgacagcagtcagtggtcacccgcgtctgaagacgccattattgcgctggcgaaccagccggaagtcgtcgctatcggtgagtgcgggctggatttcaatcgcaatttttccacgccgcaggagcaggagcgtgcctttcaggcgcagctacaaattgccgccgaattgcagataccaatctttatgcactgccgggacgcgcatgagcgatttctggtattgcttgatccctggctggatagtcttcctggtgcaatactgcactgctttaccggttcacgccagcaaatgcaggcctgtgtggatagagggctctatatcggtattaccgggtgggtttgcgacgaacgacgcgggcttgagctacgtgaactcttaccgtttattccagcggaaaagctactgatagaaaccgacgcgccgtatctgttgcctcgcgatcttacgccgaaaccaacgtcacgacgcaacgagcccgcgtatctgcctcacatcctggagcgcatagcgctatggcgtggtgaagatccgcaatggttagcggcgatgacagatgccaacgccagaaccttatttgaggttgtattctgaacgatcgctaaatcttgcgaaaaccggtgttttttacgctctgcttcacttctttattgagtaaattaagcagtaacatcgaacgcgtttcgccatccggttcggtaaaaatcgctttcagcccttcaaatgcgccttccgtgatgatgacgctatcgccgggatagggggtttcaggatcgacaacgccttcgggcttgtagatagaaagctgatgaataacgctggaaggcacgatcgcaggatgcgcgccaaagcgcacaaaatggctgacgccgcgcgtggcgttgattgtagtggtatgtatcacttccggatcaaattcaacgaacagataattaggaaagagcggttcgctgacggaggtacgttttccgcgtaccattttttccagggtgatcatcggtgtcaggcaacttaccgcttgtctttcgaggtgttcctgagcacgctgaagttgcccgcgtttgcagtacagtaaataccaggattgcataatgactcttatccgcttgttcggggcgcaagcatagcaaaagccatgcgcgaagttaattatacacttcatcctttaagccgtatctggattagcgttggttgccagagttcacgctaatttaacaaaaatacagcatcccgatgatgaacgccgtataatgatgcgcttaccaagaggctacaatggacgccatgaaatatcacgatttacgcgacttcctgacgctacttgagcagcagggggaactaaaacgcatcacgctacctgtggatcctcatctggaaatcacggaaatcgctgaccgcacgctgcgtgccggtggaccggcgttgctgtttgaaaatcctaaaggttacgccatgccggtgctgtgcaacctttttggcacgccaaaacgcgtggcgatgggcatggggcaggatgatgtttccgccttacgggaagtgggtaaattattagcgtttcttaaagaacctgagccgccgaaaggctttcgcgatctgtttgacaagctgccgcagtttaagcaagtgctgaatatgccgacgaaacggttacgcggcgcgccttgccagcagaaaatcgcgtctggcgatgatgtcgatttaacgcgtcttcctgtcatgacctgttggccggacgacgccgcgccgctgattacctggggactgacggtaacgcgtggtccgcacaaagagcggcaaaacctgggcatttatcgtcagcagttgataggtaaaaataagctgattatgcgctggctgtctcaccgcggcggcgcgctggattttcaggagtggttagccgcgcgtccgggtgaacgtttcccggtctccgtcgcattgggcgccgatccggcgacgatacttggcgccgtgactcctgttcccgatactctgtcggagtatgcctttgcgggcctgctgcgcggcacgaaaactgaagtggttaaatgcctttctaacgatctggaagtgcctgccagcgccgagattatccttgaaggttacattgagccgggagagatggcgccggaaggaccgtatggcgatcatacgggctattataatgaagtggatagctttccggtctttaccgtcacgcatattacacagcgtgaggatgccatctatcactccacctataccgggcgtccgcccgatgagcctgcggtattaggggtggcgctcaatgaagtcttcgtgcctattctgcaaaaacagtttccggaaatcgtcgacttttatctgccgccggaagggtgttcttaccgcctggcggtagtgacgatgaaaaagcagtacgctggtcatgcgaaacgcgtcatgatgggcgtctggtcgtttttgcgccagtttatgtatacgaaatttgttatcgtttgcgatgatgacgttaacgcacgcgactggaatgatgtgatctgggcgattaccacccgtatggaccctgcacgggatacggtgctggttgaaaatacgccgattgattacctggattttgcctcgccggtctccgggctgggttcaaaaatggggctggatgccacaaacaaatggccgggcgaaacccaacgcgagtggggtcgtcctattgttaaagatcctgaagttaccgcgcgtattgatgcgatttgggatgagctggctatctttaaataactgaaagcggacatcgacatttcaggctgcggcgactcagcttgaaaaatgtcggtattgacccgacacccgacagagggagcgcatgacaaccttaagctgtaaagtgacctcggtagaagctatcaccgataccgtatatcgggttcgtttagtgccggacgcggcgttttcattccgcgctggtcagtatttgatggtcgtaatggacgagcgtgacaaacgcccgttttcgatggcttcaacgccggacgagaaagggtttattgaattacacattggcgcctccgagctcaatctgtatgcgatggcggtcatggatcggattctgaaagaccgggaaatcgtcgtcgatattccgcatggcgacgcctggctacgtgacgatgaagagcgtccgttgattctgatcgcgggcggtacgggcttttcttatgtgcgctccatcctgttgacggcgttagcgcgcaacccggcccgcgatgttaccatttactggggcggccgcgaagaaaagcacctctatgatctctctgagctggaagcactctctgttaaccatccgaatttgcgtattgaacctgttgtcgagcagccggaagaaggctggcgtggacgtacaggaacggtacttacggcggtattgcaggattatggtacgctggcggggcacgatatttatattgccggacgttttgagatggcgaaaatcgcccgcgatctgttctgtcatgagcgtaacgcgcgggaagatcgtctgtttggcgatgcgttcgcatttatttaactattttatgggacgcagtagcgtccctttttacgttagcctacctaaaagtcctcttaaatattaattaatcgtcaactataaaaccttatgatattgaatatctacaggctttgtattgcgtgtaataaattaagtaatattatgtcctgaggctatcaataaaaatagttaattatatatgcttcatttatttttataaaagaaacataaaatggaaagttagttatttatttataagatggagagtgttatgaaatttaaatatgctttaacttctctcgcattatctgttgcaattttgtcatcagtaccttctactgctttcgccatcggcggcgccagcggcgctaaagtggactatcaggtccagggaaaaattggcgaagttgttatgaacccctatgatatcgcgccgctaaccgccgttattcgtaatggcggttaccagttacgtgacgtgcatgtacggattgtacccaaagaaaatggccaggagatcgcgtataaagttaataataaataccttttaacgtatggcggtattcccgtctttggtctttacccggattatgtcaataccgttgaagttgaatatacaagtatccagggtagtaaaaccgaaaatgtaaaagaaagctataaaatgtatgcaccgcctgcctatattgaatcagcgggtacaaaagaagaacaatcagcactctttactatcgatgttaaaaaggtttccccagaatttaaagatcgcttgtatcttttgaataatacgaaagataagtctgggaatggaacgcgtactgtctggaacaaccctactgggggtgcattagaatggaacttcactacagctaacgctattatcgacacctccggtgatattcgttggtttatgaatccaagttcaatttatgatttaaagtcaatttatcgtgctggcgttatgatgggctttaaacaaaaccaggatggcgcactatcgtggggctacggtcagcgttatgtgaaatacgatatcatggggcgtgaaatctttaaccgccgcctgccggataattataacgatttttcacactcaatggataacgcggccaacggtcactacttcctgcgtgtagccagctctaactataaacgccctgatgggaaaaatgttcgtaccgtgcgtgatgtgattgccgaagttgatcagaacggcgtggtagtggatgaatggcgtctgtttgatatcctcgatccttatcgtgatgtgataatgaaaaccctcgatcagggcgctgtgtgcctgaatatcgacgccagccagtccggccatacgttgagcgaagaagatctggcggcgctggactcctccgacaaattcggggatatcgtgggtagtggggctggccgcaactgggcgcatgtcaacagcgtcgactatgacagtgaagatgattccatcatcatcagctcccgccaccagagtgcgattatcaaaatcggccgcgataagaaagtgaagtggatactgggtacgcctgctggctggaaagcgccatttaatgccgcaattctgacgcctgtggatagcaaaggccaaaaaatcgcctgccaggacagtggctgcgagggtgacttcgactggacatggacgcaacatacggcctttaaaattgatagtaagagtaaaggcgatatcttatacctttccgctttcgacaatggcgatggccgcggcttagaacagcctgctatgcagagtatgaaatacagccgctccgtgatttacaaaatcgaccagaaaaacaagacagtccaacagatctggcaatacggtaaagagcgcgggaacgagtggtttagcccggtaacctctatcaccgagtaccagactgacaagaattctgtgttcgtgtattccgcaacagcaggtggtgcgtttgatttatcggtaggcgcatttaccagcttgcctaatccgtatctggaagagttcaaatggggagaaaaagagcctgcggttgaaatgcaaatacatggtgcgcgtggatatcaggctatgccatttagcctgaccaaagcgcttactgagtagagcaggccatacggtgaaaaaacccgcccctgacgggcgggaaaaacggcaactaaactgtttcccgtcataattcgcgcagcctctttgttggctgcctttgctcaccccgggcacatagttatctatgtgcccggggattcgctcagttgccgctgcgctgcaatgcgagttatttaggggatattatctttgattaaacccgctcaaacaccgtggcgatgccctgacccagaccaatacacatcgtcgccagaccaaactgcgcgtctttgcgctccatcaggttgataagcgtggtgctgatacgtgctccggagcagccgagcggatgaccaagcgcgatcgcaccgccgttgaggttgatcttctcgtctatctgctccatcaatcccagatccttaatgcatggcaggatctgtgcggcaaacgcttcgttcatctcaaacacatcgatatcgctggctgacagtcccgcttttttcaacgccagttttgacgccggaaccggcccgtaacccataattgacggatcacaacccaccactgccattgagcgaatacgggcgcgaggtttcagacccagctcacgggcacgactttcgctcattaccagcatggcggctgcgccatcggaaagcgcggatgaggtgcccgccgtgaccgtgccactaaccggatcaaatgccggacgcagcgttgatagcgcttcgaccgtggtttccgggcggatcacttcatcgtagttaaactgcttcaacacgccgtctgcatcatgaccgccagtcgggataatctccgttttgaatgcgccagactgggtggcggcccaggcgcgagcgtgagaacgcgcggcgaactggtcctgcatttcccggctaatgccgtgcaggcgggagagcatttccgccgttagccccatcatccctgccgctttggcgacgttgcgactcagacccgggtgaaaatccacgccgtggctcatcggcacgtgccccatatgctccacgccgccaaccagacaaacctgcgcatcgccggtcatgatcattcgcgctgcatcgtgtaacgcctgcatcgaggaaccacacagacggttgacggtgaccgccggtaccgaatggggaatttctgccagcagcgcggcgttacgggcaatgttgaagccttgctccagcgtttgttgtacgcagccccagtaaatatcatcgagggtcgccgctgtaagcgacggattacgcgccagcaggctacgcattaagtgggcggagagatcttctgctcgcacgttgcgaaacgcgccgcccttcgaacggcccatcggggtgcgaatagcatcgacaatgacaacctgttccattgtgactccttaagccgttttcagagaaccaaccggacgggctggttcaaccgggggataatacggttcgttatggcgcgctttattacgcagcccttccggcacctcatacagcgggccgaggtgttgatactgctgcgccatatcaagatatttcgcgctgccctgtgtatccagccagcggaatgcgccgccgtggaacggagggaagcccaggccgtagaccagcgccatatcggcttccgccgggcttgcgataatgccttcttccagacagcgaaccacttcgttaatcatcgggatcatcatacgggcgattatctcgtcgtcgctgaagtcgcgtttcggctggctgacgcttgccagcaggtcatccaccgcggcatcttcttctttcttcggcttacccttgctgtcttctttatagcgccagaagcccagaccgtttttttgcccaaaacggctggcgtcaaacaatgcgtcgatcgcgtcgcggtaatctttctgcatacgctgtgggaagcctgccgccattactgcctgcgcgtggtgggcggtatcaatacccaccacgtcgagcagataggccgggcccatcggccagccgaactgtttttccatcactttatcgactttgcggaaatccgcgccgtcgcgcagcagttgactgaaaccggcgaaataggggaacagcacgcggttaacaaagaagccggggcagtcgttgactacaatcggtgtcttgcccattttgctggcccaggcgacgactttggcaatggtttcgtctgaactcttctcgccgcgaatgatttcaaccagcggcatccggtgtaccgggttgaagaagtgcattccgcaaaagttttccggacgttccagggcgcttgccagttcgccaattgggatggtggaggtatttgaggccagcacggtttccgggcgcactttctgctcggtttccgccagtaccgcttttttgactttcggattttcgactaccgcttcgacaacaacatctacgcgatcgaaaccggcataatcgagagtcgggtggatggtcgaaatgacgcccgccagcttcagaccgtcgatcttgccgcgctccagctgtttgttcagcagcttggccgcttcggtcatgccgaggttcaacgatttatcgttgatatctttcatgatgaccggtacgcctttccaggccgactggtaagcgataccgccgcccataatgcccgcgcccagtacggctgcctgtttcggcgtctcaatatctttggtcagctttttggctttaccttttacatattgatcgttgaggaagataccgaccagcgcacgagcctcattggtatgcgccagcggaacaaagcttttattttccagattcagcgcttcttcacgaccaaaacgcgcggcggcttcaatggttttcactgcggtcatcggcgccggataatgtttacccgccgtttgtgcgaccatgcctttagcgatggtaaagctcatcgctgcttcaatcttactgagtttcaacggttccagtttcggctggcgtttagctctccagtcgagatcgccggtaatggcctggcgtaacaccgctatcgcgccttcaattagcttctcttgtttgaccacgccgtccacaaggccgattttcagcgcgtgctcagcaccgacatctttacctgccgcgataatctccagcgcgctgtctgcgcccagcatacgcggcagacgaacggagccgccgaaacccggcatgatgcccagtttagtttccggcagaccgatacggaggtctggcgtcgccagacggtaatcggtggccagcacgcattcgcacccgccgcccagcgcatagccgtttacggcggcaagggtcggtacgggtaaatcttccagacggttaaagacgctattagcgaaatgcagccattggcttaactgctcttcggggacgaggaacagtgaaagaaattcggtgatgtccgcgccgacaataaaggccgctttattagagcgcagcagcagcccttttaaatcgtgttgcttttccagcacctcaagcgcctggccgaggctggcgacggttgcggtgtcgagtttattgaccgagcctggagcatcgaacaccagttcggcgatgccatcttccagccagtcgaggtacagggtgtcgcctttataaagcatgtcagtctcctgaatccacaaagtgatctggtcgtaccagatgaagcgaagtgtgtattttgtgttaaaaaaatgcaaataaatgattaaagaaatgccgatgtgatcacgctcggcagagatcacgctctcgtggggcgatgtgctaagatgcgggaacttgaggtcaaaaaaacagaagggtaaaaaatggaatcactggccgcgctctataaaaatcatattgttaccttacaagaacggacgcgcgatgttctggcgcgctttaagctggatgcgttacttattcattctggcgagcttttcaacgtctttctcgacgatcacccttatccgtttaaggtcaatccacagtttaaagcgtgggtgccggtaactcaggttccaaattgctggctgttggtcgatggcgtcaacaaacccaaattgtggttttatctgccggtcgattactggcataacgttgaaccgctgccaacgtccttctggacagaagaagtcgaggtcgtcgccttaccgaaagcggatggcatcggcagccaactgcctgccgcgcgtggcaatatcggctatatcggcccggttcctgagcgcgcgctacaattggatatcgccgccagcaacatcaacccgaaaggtgttatcgactatctgcattactaccgcgcctataaaacggattatgaactggcctgtatgcgcgaagcgcagaaaatggcggtgagcggtcatcgggcggcggaagaggccttccgttccggcatgagcgagttcgacatcaacctggcgtacctgaccgccacgggacatcgcgataccgatgttccatacagcaacattgtggcgctgaacgaacatgccgccgtgctgcattacacgaaactggatcatcaggcaccgtctgaaatgcgcagtttcctgctggatgcgggcgcggaatacaacggctacgcggcggatctgacgcggacctggtcggcgaaaagcgataacgactacgcccacctggtgaaagatgttaacgacgaacagttggcgctgatcgctaccatgaaggcgggcgtcagctatgtggattatcatattcaattccatcagcgcatcgcgaagctgctgcgtaaacatcaaatcattaccgacatgagtgaagaggcgatggtggaaaatgatctcaccgggccgtttatgccgcacggtattggtcatccgttgggtctgcaggtacacgatgtggccgggtttatgcaggatgattccggtacgcatctcgccgcgccgtccaaatacccgtatctgcgctgcacgcgtgtgttacagccgcgaatggtgttgaccatcgaaccggggatttacttcatcgaatcgctgttagcgccatggcgcgaaggcccgttcagcaagcacttcaactggcagaaaattgaagcgctcaagcctttcggcggtattcgcattgaagataacgtggtcatccacgaaaacggcgtggaaaacatgacgcgggatttaaaactggcgtaatggacagttggttaatccctgcagcgccggtcaccgttgttgaagagatcaaaaaaagccgctttattacgctattggcgcataccgatggcgtagacgcggcgaaagcgtttgttgagtcagtcagagctgagcatcctgatgcgcgccaccattgtgtggcgtgggtggcgggtgcgccggacgactcacagcaactgggcttttcagacgacggcgaaccggcgggaacggcaggcaagccgatgcttgcgcaattgatgggcagcggcgtcggagaaattactgccgtcgtcgtgcgctactatagtggtattctgctgggtacgggcgggctggtaaaagcctatggcggcggtgtgaatcaggcattacgtcagcttgccacacaacgcaagacgccattaaccgaatatactttgcagtgtgagtacggtcagttggccggaatcgaagcattattaggacagtttgccgggaagatcgtttccagcgattatcaggcgtctgttcggctcagggtggcgcttccttttgctcatgtgaatgcattttccacaaaactggcggattttagccgtggttcattgcaattgttagcgattgaagaataatccccacctcatttttaagaataaaggaagcggcagagatgcattttcgcgccattacccgaatcgttggactactggttatcttattttcggggacaatgattctcccgggactggtagcgctaatatatcgtgatggcgcaggaagagcgttcacgcagaccttttttgtcgcgctggcgatcggttccatactgtggtggccgaaccgtagggaaaagggcgagctgaaatcccgcgaaggatttcttatcgtggtgctgttctggaccgtgctgggcagcgtgggtgcgctgccgtttattttctcggaaagcccaaacctcaccattaccgatgctttttttgaatcgttctccgggttaaccaccacgggcgccactactctggtggggctggattcattaccgcacgccattctcttttatcgtcagatgctgcaatggtttggcggtatggggatcattgtgctggcggtggcgattctccctatcctcggcgtcggggggatgcagctctatcgggcggaaatgccggggccgctcaaagataacaaaatgcgcccgcgtattgccgagacggcgaaaacgctgtggcttatctatgtcttgctaacggtagcctgcgcgctggcgctatggtttgcagggatgcccgcgtttgacgctatcggacacagcttctccactatcgctatcggcggcttctcaacgcatgacgccagcgtaggctattttgatagtcccactattaataccatcatcgctattttcctgctgatctccggttgtaactatggcctgcatttctctttattaagcgggcgtagcctgaaagtatactggcgcgatccggaattccgcatgttcatcggcgtacagttgacgctggtggtgatctgcacgctggtactgtggttccataatatctacgactcggcgctgacaacgctaaatcaggcgttcttccaggtcgtgtcgatggcgacaacggcagggtttaccacggacagcattgcgcgctggccgctgtttttgcccgtcttgctgctatgttccgcgtttattggcggttgcgccgggtcaacgggcggggggttaaaggtcatccgtattctgttgttgtttaaacaggggaaccgcgaactcaaacgtctggtgcatccgaatgccgtttacagtattaagctggggaaccgggcactgccagaacgtattctggaagccgtctggggattcttttctgcctacgcgctggtatttatcgtcagtatgctggccattatcgctacaggcgtagatgatttctcggctttcgcctcggtagtggctacgcttaataacctgggaccggggctgggggtggttgctgataacttcgccagtatgaatccggttgcgaaatggatactaatcgccaacatgctatttggtcgtttggaagtattcactttgctggtactttttaccccgactttctggcgtgaataatggagtaacacgtgaaaacattgattcttttctctacccgggacggacaaacgcgcgaaattgcctcttatctggcttctgaactcaaagatatggggatctgggccgatgtcgttaatctgcatcgcgcagaagagcctgactgggatagctatgatcgcgtagtgattggcgcgtctattcgttatggtcattaccacagcgcctttcaggagtttgttaagaaatatgccacgcggttgaacggaatgccgagcgccttttattccgttaacctggtggcgcgtaaagctgaaaaacggacgccgcagactaacagctacgcgcggaagtttttaatgagctctccgtggcgacctgactactgtgccgtcattgcaggcgcgcttcgctatccccgttatcgctggtatgaccgtctgatgatcaagcttattatgaagatgtcgggcggcgaaacggataccagtaaagaagtggtgtacaccgactgggagcaggttgcgcactttgcccgtgaaatagcccatttaaccaacaaatcgtcggcaaaataaacgcaaagaataaaaagtgcgcactcagaaaattattttaaatttcctcttgtcaggcaaaaataactccctataatgcgccaccactgacacggaacaacggcacacaggccgccgggtcagcggggttcggaccagaacctcacggagaaaagcgaaaataaacgcttgactctgaagcgggaaagcgtaatatgcacaccccgcgccgctgagaaaaagcgaagcggcactgctctttaacaatttatcagacaatctgtgtgggcactcgaagatacggattcttgacgtcgcaagacgaaaaatgaataccaagtctcaagagtgaacacgtaattcattacgaagtttaattcattgagcatcaaacttttaaattgaagagtttgatcatggctcagattgaacgctggcggcaggcctaacacatgcaagtcgaacggtaacaggaagcagcttgctgcttcgctgacgagtggcggacgggtgagtaatgtctgggaaactgcctgatggagggggataactactggaaacggtggctaataccgcataacgtcgcaagaccaaagagggggaccttcgggcctcttgccatcagatgtgcccagatgggattagcttgttggtgaggtaacggctcaccaaggcgacgatccctagctggtctgagaggatgaccagccacactggaactgagacacggtccagactcctacgggaggcagcagtggggaatattgcacaatgggcgcaagcctgatgcagccatgccgcgtgtatgaagaaggccttcgggttgtaaagtactttcagcggggaggaaggtgttgtggttaataaccgcagcaattgacgttacccgcagaagaagcaccggctaactccgtgccagcagccgcggtaatacggagggtgcaagcgttaatcggaattactgggcgtaaagcgcacgcaggcggtctgtcaagtcggatgtgaaatccccgggctcaacctgggaactgcattcgaaactggcaggcttgagtcttgtagaggggggtagaattccaggtgtagcggtgaaatgcgtagagatctggaggaataccggtggcgaaggcggccccctggacaaagactgacgctcaggtgcgaaagcgtggggagcaaacaggattagataccctggtagtccacgccgtaaacgatgtctacttggaggttgtgcccttgaggcgtggcttccggagctaacgcgttaagtagaccgcctggggagtacggccgcaaggttaaaactcaaatgaattgacgggggcccgcacaagcggtggagcatgtggtttaattcgatgcaacgcgaagaaccttacctggtcttgacatccacagaactttccagagatggattggtgccttcgggaactgtgagacaggtgctgcatggctgtcgtcagctcgtgttgtgaaatgttgggttaagtcccgcaacgagcgcaacccttatcctttgttgccagcgattaggtcgggaactcaaaggagactgccagtgataaactggaggaaggtggggatgacgtcaagtcatcatggcccttacgaccagggctacacacgtgctacaatggcgcatacaaagagaagcgacctcgcgagagcaagcggacctcataaagtgcgtcgtagtccggattggagtctgcaactcgactccatgaagtcggaatcgctagtaatcgtggatcagaatgccacggtgaatacgttcccgggccttgtacacaccgcccgtcacaccatgggagtgggttgcaaaagaagtaggtagcttaaccttcgggagggcgcttaccactttgtgattcatgactggggtgaagtcgtaacaaggtaaccgtaggggaacctgcggttggatcacctccttaccttaaagaaacggtctttgaagtgctcacacagattgtctgatgaaaaacgagcagtaaaacctctacaggcttgtagctcaggtggttagagcgcacccctgataagggtgaggtcggtggttcaagtccactcaggcctaccaaattttccctgaatactgcgttgtgaaataactcacatactgatgtatgcttcgttattccacgccttgtctcaggaaaaattatcggtaaagaggttctgactacacgatggggctatagctcagctgggagagcgcctgctttgcacgcaggaggtctgcggttcgatcccgcatagctccaccatctcgtgagtgtttacgaaaaaatacttcagagtgtacctgaaagggttcactgcgaagttttgctctttaaaaatctggatcaagctgaaaattgaaacacagaacaacgaaagttgttcgtgagtctctcaaattttcgcgacacgagaatgttttacgaaacatcttcgggttgtgaggttaagcgactaagcgtacacggtggatgccctggcagtcagaggcgatgaaggacgtgctaatctgcgataagcgccggtaaggtgatatgaaccgttataaccggcgatttccgaatggggaaacccagtgtgattcgtcacactatcattaactgaatccataggttaatgaggcgaaccgggggaactgaaacatctaagtaccccgaggaaaagaaatcaaccgagattcccccagtagcggcgagcgaacggggaggagcccagagcctgaatcagcatgtgtgttagtggaagcgtctggaaaggcgcgcgatacagggtgacagccccgtacacaaaagcgcatgtgctgtgagctcgatgagtagggcgggacacgtggtatcctgtctgaatatggggggaccatcctccaaggctaaatactcctgactgaccgatagtgaaccagtaccgtgagggaaaggcgaaaagaaccccggcgaggggagtgaaaaagaacctgaaaccgtgtacgtacaagcagtgggagcacccttcggggtgtgactgcgtaccttttgtataatgggtcagcgacttatattctgtagcaaggttaaccgtataggggagccggagggaaaccgagtcttaattgggcgttaagttgcagggtatagacccgaaacccggtgatctagccatgggcaggttgaaggttgggtaacactaactggaggaccgaaccgactaatgttgaaaaattagcggatgacctgtggctgggggtgaaaggccaatcaaaccgggagatagctggttctccccgaaagctatttaggtagcgcctcgtgaattcatctccgggggtagagcactgtttcggctagggggccatcccggcttaccaacccgatgcaaactgcgaataccggagaatgttatcacgggagacacacggcgggtgctaacgtccgtcgtgaagagggaaacaacccagaccgccagctaaggtcccaaagtcatggttaagtgggaaacgatgtgggaaggcccagacagccaggatgttggcttagaagcagccatcatttaaagaaagcgtaatagctcactggtcgagtcggcctgcgcggaagatgtaacggggctaaaccatgcaccgaagctgcggcagcgaacgtatcacccaagacaactttacggagttggcgattgacggagcgaagcgacgtcaaagcgttcattaaagtcgagttggcttagggatacgttcgttgggtaggggagcgttctgtaagcctgtgaaggtgtgtcgtgaggcatgctggaggtatcagaagtgcgaatgctgacataagtaacgataaagcgggtgaaaagcccgctcgccggaagaccaagggttcctgtccaacgttaatcggggcagggtgagtcgacccctaaggcgaggccgaaaggcgtagtcgatgggaaacgggttaatattcccgtacttggtgttactgcgaaggggggacggagaaggctatgttggccgggcgacggttgtcccggtttaagcgtgtaggtgtgtgttccaggtaaatccggttcactttaacactgaggcgtgacgacgaggcactacggtgctgaagcaacaaatgccctgcttccaggaaaagcctctaagcatcaggtaacacgaaatcgtaccccaaaccgacacaggtggtcaggtagagaataccaaggcgcttgagagaactcgggtgaaggaactaggcaaaatggtgccgtaacttcgggagaaggcacgctgacacgtaggtgaagtgatttactcatggagctgaagtcagtcgaagataccagctggctgcaactgtttattaaaaacacagcactgtgcaaacacgaaagtggacgtatacggtgtgacgcctgcccggtgccggaaggttaattgatggggtcagcgtaagcgaagctcctgatcgaagccccggtaaacggcggccgtaactataacggtcctaaggtagcgaaattccttgtcgggtaagttccgacctgcacgaatggcgtaatgatggccaggctgtctccacccgagactcagtgaaattgaactcgctgtgaagatgcagtgtacccgcggcaagacggaaagaccccgtgaacctttactatagcttgacactgaacattgagccttgatgtgtaggataggtgggaggctttgaagtgtggacgccagtctgcatggagccgaccttgaaataccaccctttaatgtttgatgttctaacgtggacccgtaatccgggttgcggacagtgtctggtgggtagtttgactggggcggtctcctcctaaagagtaacggaggagcacgaaggttggctaatcctggtcggacatcaggaggttagtgcaatggcataagccagcttgactgcgagcgtgacggcgcgagcaggtgcgaaagcaggtcatagtgatccggtggttctgaatggaagggccatcgctcaacggataaaaggtactccggggataacaggctgataccgcccaagagttcatatcgacggcggtgtttggcacctcgatgtcggctcatcacatcctggggctgaagtaggtcccaagggtatggctgttcgccatttaaagtggtacgcgagctgggtttagaacgtcgtgagacagttcggtccctatctgccgtgggcgctggagaactgaggggggctgctcctagtacgagaggaccggagtggacgcatcactggtgttcgggttgtcatgccaatggcactgcccggtagctaaatgcggaagagataagtgctgaaagcatctaagcacgaaacttgccccgagatgagttctccctgagacttagagtctcctgaaggaacgttgaagacgacgacgttgataggccgggtgtgtaagcgcagcgatgcgttgagctaaccggtactaatgaaccgtgaggcttaaccttacaacgccgaagatgttttggcggttgagagacgattttcagcactgattcagattacatcagaacgtaaaaacggtctgataacagaatttgcctggcggcactagcgcggtggtcccacctgaccccatgccgaactcagaagtgaaacgccgtagcgccgatggtagtgtggggtctccccatgcgagagtagggaactgccaggcatcaaataaaacgaagggccctgtcggaagacagggccttttgttttatctgtggtctgtcggtgagcactcgttgcgcagcaacggcccggagggtggcgggcaggacgcccgccataaactgccaggcattagtttagtgaagaagcccatcctgacggacgggcttttttgcgtgtgcggtaactgtaaaaccgtaggcctgataagcgcagcgccatcaggcaaccggcactgccggatggcggctccgccttatccggcctacaaggaacgtgctttctctaaccaccgcaaaatgaaggcagaaatctgcgatacatcattaagatccaaaacgggtaccgctacggcaagtggaatatcactggcaaccgcaataacatgctcatcaagaattaattcttcctcgctgtgcccacatccctgacgaaaaagtaagatcttcgcaactgcctcgtgtttaaacccttctaccagcaccatatctagctttgatgcatccatccggctcaccagccatgccagatccaactcttcttgccccggcgtttcagtcattaacgcccagcgctgctgactggcaaccagcgtctgtgccgccccggctttacgtaattcgtagctatctttacccggtttatcaacatccatatcatgatgggtatgcttaatcagccctggccgaataccgtgcgcacaaagtgctgggatcagttttttcagcagtgttgtttttcccgtgccgctccacgcggcaatggcgagtagcggtatcatggtctcttttgccattgcgcgagttcctccggcgtgttgacgttcacaaatgcctccttacaatcgctgaaatcaacggcgtgtccgcctacctggcgcataaaaatcattacccgccgctcgcctgcttgcaaataagctgtcaactggggctcaacggcacgattaatcaacgcgatcgttggatgatcgcgctctccatcatgaacccaaaccacgggtgcaccatgacgctgcgctgctaaacgatcgaccaggttgtgggggatacagggattgtcacagggacaaaacagaaaccagtcgcctgctacctgctgaaaaacggaaagcatacccgccagcggaccgggaaagtcagcaattgaatccggaatgactttcaggccgctggcctggtagatatccagatggcgattagcactaatgacgaccgtagcaagttgtggcgcgagcgcgtcggcaacgtgtcgccagagcggtttcccgcccagttcaagcagacctttatccgcacctcccatccgcctggctttaccgcctgccagcaccacgccggttattacttcatccagattcaccgatatcgcctcttttattgtgggattgaccctgctaccgtgtctgtatcaagaataaggagcacagctatgaaatgtaaacgcctgaatgaagtcattgaactcctccagccagcctggcagaaagagcctgatcttaatctgacgcaatttttgcagaaactggcgaaagagtcaggttttgacggcaaactggaagatttaactgatgatatcctgatctaccatctgaaaatgcgcgattccgccaaagacgccgccattccagggattcaaaaagactatgaagaggactttaaaacggcgcttttacgcgcccgcggcgttattaaagagtaaaaccttgtaagcggcgccaccgaaatcgccacgaaatgatatcctgaatcattcgtagtattttccggatgatgggatgaacgacaacgcttttactttccagacgctacacccggaaaccatcatggatgcgctgtttgaacaggggatcatggtggattccgggctaactccactaaacagttatgaaaaccgcgtctatcagtttcaggatgaagaccgtcgacgttttgtcgttaagttttatcgtcctgaacgctggtctgttgatcaaattcgggaagaacatcaattcgcgcttgaactggtgaaggatgaggttccggttgctgctccgctcgcgtttaatggccagacgctgttagcgcatcagggctatcattatgccattttccccagcgtaggcggtcgtcagtttgaagcagacaatatcgatcagatggaggcggtagggcgttatcttggccgattgcatcagacggggcgaaaacgtcctttcactttccggcctgacattgggcttgcggagtatctttttgaacctcgccaggtattcgaagatgccgcactgattccctccgggcaaaaagcggctttcctgaaagccactgatactctactgtctgcagttaccgaatgctggcgcaccgatttcgccacgctgcgattgcacggcgattgtcatgccggcaacattctatggcgtgatggaccgctgtttgtcgatttagatgatgcccgtaacggtccggcgatacaggatttatggatgctgctgaacggcgacaaagccgaacagcgaatgcagcttgaaaccattattgaagcttatgaagaagttagtgagttcgatacggctgaaattggtctcattgaacctttacgcgccatgcgtttagtttattatcttgcctggttgattcgtcgttggggcgatcctgcgtttccaaaaaactttccctggttaacaggggaagattactggcagcgacagacaacgacttttattgagcagactaaaattttgcacgaaccccctttacaattaacgccaatgtattaatcggagagagttgatcatgaaaaagatttggctggcgctggctggtatggttttagcttttagcgcctcggcagcacagatcagcgacggtaaacagtatatcacgctggataaaccggtcgctggcgaaccccaggtactggagtttttctccttctactgcccacattgttatcagtttgaagaagtgcttcatgtgtctgacaatgtgaagaaaaagctgccggaaggcaccaaaatgaccaagtaccacgttgagttcctggggccgttgggcaaggagctcacccaggcatgggcggtggcgatggcgttgggtgtagaagataaagtcacggtcccgctgtttgaagccgtacagaaaacccagacagtacaatctgccgcggatatccgtaaagtgttcgttgatgcgggcgtcaagggcgaagattacgatgcggcatggaacagcttcgtggtgaaatcactggttgcgcaacaggagaaagccgcggctgacctgcaactgcagggcgttccggcgatgttcgtcaatggcaaataccagattaacccacaaggcatggatacgagcagcatggatgtttttgttcagcagtatgctgatactgtgaaatatttggttgataaaaaataaaaagaacgccggtcactgaccggcgtttttataagatgttttaatctcttctatctgtatatctttcttatcccacagcgtattaagccaacgttgaaaacggcgtttgaatgttttgtcgttcacgtaatcgccgtgcagttcttcatttatgggttccagttgcacccgaacaacaatacgcgtcagcctaccgcttagcatatcgtagaaagggtgacgatcgttgtttgggtaacacaacgtaatattaagcagcttatcgaactgtgagcctaaaacattaatcgccattgcaataccggctgcttttggcggcaacaaatgttgataaggtgaatgcgtttgctgacgtttctcatgcgtaaatcgcgagccttcaacaaagttaacgatagtggtgggataccgacgaaacttttcgcaagagcgacgagttgtttcaacatctttgccgcgtcgatcggggtgtcggagcaggtagctacgggagtagcgcttcataaacggcatatctaatgcccagcacgccaggccgatgaacggcacccaggccaattgctgtttaagaaagtacttattcattgggatatgcttgcggaacagaacgcaaagcacaacgatatcggcccagctgcgatgattacaaatcagtaaataccaatttttcttgctcagcccttctaacccttctacatcccattgcaagtgcggattaaggcgtaacagcgctgcaagaccagcacaccagcaatacatcatgaaattgcagaaaatggagaccttgcgccagataccgggaacaggcaaaagaagctttaccataccggcaatgatgatcggtactgagcaaacaatagtgaccaggatggtcaatacgatactcaatgggagcgtgatagccgcgagtattctcgtcataataaattattcaaaagttagccataaacggtgcgcgaaaagggcgcaaggggctgattctatcagaaaacgatgctaatgatggcgctgagtgaaatagaaacactcgtaacaactatccacattatgataacggcatgaatcagataatcagaaaaacgtgatgttaacaactcattgaaaataatgggtaattattaagacgagaaggctatcgcgctgattttaaagtaatggtaagaatttacacacaaagttatccacaggttattttgcgagcgatcctgaagatcgacaaaacttttccgcaaatgcggcgaaaaactcaagttttcctcctgtatgtggcatcctttaaccataatctgttaaacaggcacggacattatggttcagatcccagaaaacccacttattctcgtagatggctcatcctatctctatcgcgcctatcatgcgtttccgccgttaaccaacagcgcgggagaacctacgggcgcaatgtatggtgtcctcaacatgttgcgcagcctgatcatgcagtatcagccgacgcatgctgcggtggtgtttgacgccaaaggaaaaaccttccgtgatgagctctttgaacactacaaatcgcatcgtcctccaatgccggatgatcttcgtgcgcaaatagagccgttacatgccatggttaaagccatggggttacctctgctggcggtctctggcgtagaagcggatgacgttatcggtacactggcgcgagaagcggagaaggtggggcgtccggtattaatcagcaccggcgataaagatatggcacagttggtgacgccgaatattacgctgatcaacaccatgactaacaccatcctcggcccggatgaagtcgttaataagtacggcgtgccgcctgagctgattatcgactttctggcgctgatgggggactcctcggataatattccgggcgtaccaggcgtgggtgagaagacggcgcaagccttgcttcagggattgggcggcctggatacgctgtacgccgagccggaaaaaattgccggtctcactttccgcggcgccaaaacgatggccggtaaattagcgcagaataaagacgtagcgtacctgtcttataaactcgccaccattaaaacggatgttgagctggagctgacctgcgaacagcttgaagtgcagcagccgattgcggatgaactgctgggcctgtttaaaaaatatgagtttaagcgctggacggcggacgttgagtcaggcaagtggctacaggcaaagggcgcgaaaccggcggccaaaccgcaggaaacggtcgttattgatgaatcgcccagcgaaccggcagcggcgctctcttatgaaaattatgtcacgattctggacgacgttacgctggaaagctggattgaaaagctgaaaaaagcgccagtttttgctttcgacacggagaccgacagcctggataatatcgccgccaacctggtgggcctctcgtttgccatcgaacctggcgttgccgcgtatgtacctgtcgcgcatgattatctggacgctccggatcaaatctcccgccagcgtgctctggaactgctgaagccgctgctggaagatgaaaaagtgcgcaaagtggggcaaaacctcaagtacgatcgcggcgtcttgcaaaattacggtattgagctgcgcggtatcgccttcgataccatgcttgagtcttacattctgaacagcgtcgccggacgccatgatatggacagtttgtccgatcgttggctgaagcacaaaactatcacctttgaagacattgccggtaaaggtaaaaaccagctcacctttaaccagatcgcactggaggaagcggggcgctatgcggcagaagatgcggatgtcacgttacagttgcatctcaaaatgtggcctgagctccagcagcacaaaggcccgctgaatgttttcgaaaacatcgaaatgccgttggtgcctgtactgtcacgcgttgagcgcaatggcgtaaaaatcgatcctgccgtcctgcacaaacattcggaagaaatcacgctacgtctggcggaactggaaaagaaagcgcatgacattgcgggcgaggcgttcaacctgtcctcgacgaagcagttgcagaccatcctgtttgaaaagcagggtattaagccgctgaagaaaacgcctggcggcgcgccgtcaacgtcggaagaggtgctggaagagctggcgctggactatccgctgccgaaagtgattctggagtatcgtggtctggcgaagctaaaatccacctataccgataagctgccgctgatgattaacccgaaaaccgggcgcgtccatacgtcctatcatcaggcggtaacggcgacgggacgtttatcgtccaccgatccgaacctgcaaaatattccggtgcgcaatgaagaaggccgccgcattcgtcaggcatttattgcgcctgaggattatctcatcgtgtctgcggactattcacagattgagctgcgtattatggcgcatctttcccgtgataaaggactgctcacggcgttcgccgaagggaaggatattcaccgcgcaacggcggcggaagtctttggcttgccgctggatagcgtgaccggggaacagcgccgaagtgcgaaagccattaactttggcctgatttacgggatgagcgccttcggtctttctcgccagcttaatattccgcgtaaagaggcgcagaagtatatggatctctacttcgaacgctatcctggcgtgctggaatatatggagcgcacccgcgctcaggcaaaagaacaaggctatgtggaaactctggaggggcgccgcctttacctgccggatattaaatccagcaacgcggcgcggcgcgcgggggcggaacgcgcggcgatcaatgctcccatgcaaggaacggctgccgatatcatcaagcgcgccatgattgccgtcgatgcctggctacaggccgagcagccacgcgtgcggatgattatgcaggtacacgatgaattagtgttcgaggtgcataaagacgacttagatgcggtagcaaaacgtatccatcagttgatggaaaactgcacgcgtattgatgtgccgttgctggtggaagtcggtagcggggaaaattgggatcaagcgcactaagcatttaaggaataacgcgcttttttcgtaattaagcaacataagcacgggggttttgtgatgggtattagaattccctatgtaaagaatgaaaaaaaattacgaaaaggtctttctgtgttgctcaaaaaagagtaaagttattcacgtagggtacagaggtaagatgttctatctttcagaccttttacttcacgtaatcggatttggctgaatattttagccgccccagtcagtttatgactggggcgttttttattgtgcgcaagaaaagtttcgctcacaccgtaggccggataagacgcgcagcggcgccatccggcatagcgggtgattattccccgtcctgaatctcttcgaccggtgccagttcactaaaccagctatccagcttctgacgtaacttatccacgccctgctttttcagcgaggaaaacgcttctacctgcacatcgccattaaaagccagcacggcttcacgtaccatattcaactgcgccttgcgcgcgccgctggccagtttgtccgctttggtcagcagaaccagaacctggatattgctctctacagcccactggatcatctgttggtcgaggtctttcaacggatggcggatatccattaaaacgactaagccctgtaggctttgacgtttctccagatattcccccagcgcgcgttgccacttgcgtttcatctcttccgggacttccgcgtagccatagcccggcaggtcgaccaaccgtttgccatctacgacttcaaacaggttaatcaattgggtacggcccggcgttttagaggtgcgcgccaggcttttttggttggtcaacgtgttcagggcgctggatttgcctgcattggaacggccagcaaaagccacttcaattccgcaatcggaaggtaaatggcgaatatcaggcgcactcatcacaaaatgcgtctgttgataattcaggttagtcaaagcggtcgtctccgtcagtcaaagcattgtggcgattatacctgaacgccagcaaaagacggatttttcggcgcatcggtgctgtaagtaaaagccatacgctttgtgagacattgaccattgcacttatgcgacatgacagagtcgttgtcaggctcaaagccagttaatatagttaaatcatgaatttatagaaaggtaattgtctgaaaaaaagggatttgccgtgtcggtatcttgtgagtttaccccaaaagagtaaagtaatgcacatagcgaggacgctaacaggatcaacgactcaggatgagggtcaggagcgccaggaggcgaagacacaggattgtcaggaagacaaacgtccggagacgttagtaaaaggaaatggaaacaacatggaatgttccaggctaagggaaaaacagggcgtgttgatagccaacagggatggtggaacccgttaagggtcgtgagtcaagaaaaaaggcggcagattactctgtcgccttttttctttgcttgctttctgctagattccgcctcaattctatactgaataaaacggcttaaagatctgacatcatgaaaaaaccaacctctgcaccgcgcagtaaagcctttggcaaacagcgtcgtaaaacgcgtgaagagttaaaccaggaggcgcgcgaccgtaaacgcctgaaaaaacatcgcggtcatgcgccgggaagtcgcgcggcgggcggcaattccgcttcgggcggcggcaatcagaatcaacaaaaagatccacgtattggcagtaaaacacctgttccattgggcgtgactgaaaaagtgacccaacagcataaaccgaaaagtgagaaacctatgctttcaccgcaggcggagttggatttactggaaacggatgagcgcctggatgcgctgttagaacgtctggaagcgggcgaaaccctgagtgcggaagatcaagcctgggtagatgccaaactggatcgtattgatgaactgatgcagaagcttggtctgtcttacgatgacgacgaagaagacgacgaagaggacgagaagcaggaagatatgatgcgcctgctaagaggcggcaactaacgggtttacaccgtgggcttgcccgtcctgcttataacccttccggttatatgttatctggtgtggttattcgttaaactacagcgattgtcgcggcgacagaaatggctgcgcagccggcttgccgcccgtcatggcgtgaagccggtacgccgtacccgccagagacgccatcggaaggagtgagcatgtctgaacagcaaatagactgggatctggccctgatccagaaatataactattccgggccacgatatacctcgtacccaaccgcgctggagttttctgaagacttcgaggacgccgcattcttgcaggctgtggcgcgttatcctgaacgtccgctctcgctgtatgtgcatatcccgttttgtcacaagttgtgttatttctgcggctgcaacaagattgtcacccgccaacagcataaagctgaccagtatcttgacgcgcttgagcaggaaattcgtcatcgcgcgccgctgtttgcagaccgtcatgtcagccagcttcactggggcggcggtacgcctacttacctgaataaagcgcaaatcagccgcttaatgacgctgttgcgtgaaaatttccactttaataccgacgcggaaatctcgatcgaagtcgatccccgtgaaattgagctggatgtgctcgatcatttacgtgcggaaggttttaaccgcctgagtatgggcgtgcaggactttaataaagaggtgcagcgcctggttaaccgcgagcaggatgaagaattcatctttgcgctgcttaatcacgcccgcgatatcggctttacctcgaccaatatcgatttgatctacggtctaccgaaacagacgccagaaagcttcgctttcacgctgaagcgtgtgacggaactgaaccccgatcgtttgagcgtctttaactatgcgcatctgccaacgctttttgccgcccagcgtaaaattaaagatgctgatttacccagcgcgcagcagaaactggatattttgcaggagacgatcgtatcgcttacccaggctggttatcagtttatcgggatggaccattttgcccgtccggacgacgaactggccgtcgcgcagcgcgaaggcgtgttgcaccgtaattttcagggctatacgacccagggcgataccgatctgctggggatgggggtttctgctatcagcatgattggcgatggctacatgcagaaccagaaagagctgaagcgttattaccagcaagtggatgagcggggcaatgcgctatggcgtggtattacgctgacccgtgatgattgcattcgtcgcgatgttatcaaggcgctgatttgtaacttccgcctggattttaacgctgtcgaacagcagtggggtttgcatttcgctgagtattttgccgaagatttgcagttactgtcgccgctggcgaaagatgggctggtggatattagcgagaagggaattcaggtgacggcgaaaggtcgtttgctgatccgcaatatctgcatgtgctttgacgcgtatctgcgccagaaagcgcggatgcagcagttctcgcgcgtcatttagccgggttgcccggtggcgctgcgcttaccaggcctacacgttgcgacaacctgtaggccggataagcattagcgccatccggcacattgtcagctgaacagtcccaccagcgcggcacacaacacggcggctagcgcagtttgtggcgtgtggctgtcgaccgctccactcgataccagattaataatagattctaacataatgaatccccccgtttgccgggcatgatcatactgaactcatcggaacagtaaagcgcaaaatagcagcgttttgcgctcaattattaatctttacactcgcgggtaatgtttactccattcccagctctttcaacttccgcgttagggtgtttcgcccccaaccgagcagcctggcggcttcctgtttatgaccctgcgtatggcgtaatgccgtggtcagtagcgttctctccagttctggctgcgcttcagaaagcaggttttgatgaccggatcgcaaggcgcggtccgcccattgtgccagtaatgtagcccagctatccggcggcaggtgggacgggctatccggcgtcgaggcttcaaacagttcgcccggtaaatcctggatcaatacctcctgtccggcggccatgacggtgagccagcggcaggtattttctaactgacgcacgttaccaggccatgccaggcgcgttaacgccgtttcggtttccggatgtaataatttggcttccacgcctaattcacgggcggcgacctgcaaaaaatggcgcgccaggcgcggaatatcctcacggcgttcacgcaacggcggaagatggatacgaatcacgttcaggcggtggaacaggtcttcgcggaatttcccttcctgaacgcgtcgttcgaggttctggtgggtggcggcgataatgcgcacatcgacttttaccggcgcgtacccgcccacgcggtagaactgtccgtcagccagcacgcgtaacagacgagtctggacatccagcggcatatcgccaatttcgtccagaaacagcgtgccgccgtcagcctgctcgaaacggccctgccggatggtattcgccccggtaaaagcgcctttctcatggccaaacagttcggattcaatcaaatctttcgggatggccgccatattgagtgcgataaacggcgctttggcgcgtgggctatggcggtgaagcgcatgggcgaccagttctttaccggtccctgattcgccgttaatcagcacgctaatcgaagaacgcgacagccgaccaataatgcgaaacacatcctgcatggcgggcgcttcgcctatcatgtctgttgtcgggccgttaacctcgatattacgcggctgttgctgctcctgatagtggctaatcgcgcgctcgaccagagcgacggcttcatcaatatcaaacggtttaggcagataatcaaacgccccctgctgataggcgctcacggcggcatctaaatcggaatgcgcggtcataatgatgaccggaagcatcgggtgacgctgtttaatctgctttaatagcgccagcccgtccattcccggcattcggatatccgacagcaagacgtccggcgttttactggccagcgcagccagtacttcattaccattctcaaaggtggtacaggtcaaccctgccccggcgagagcacgctcaagcacccaacggatggaactatcatcatcgacgacccagactattcctcgttgcataaacacctctatttccgaatcggcaggtaaaccgaaaactcggtatgccccggccaactggtaaattcaattttgccggcgtgttgatcgataagattgcgggcgatagataacccaagcccggtgccgccttcgcgaccgctgaccatcgggtagaacagcgtatcctgtaaatggggaggaatgcccggcccattgtcttcaacgtctatacgcgccgccaggcgatagcgttcgccatgcagcgttaactggaaggcggtacgggtacgcagcgtaatttcgccgccttccggccccagcgcctgcaaggcattgcggacaatattcagcagtacttgctcaatttgttccgggtcgtgcggcagttctggcaaactggggtcataatcgcggataagccggacattatccggcagttccatcgacaccagcgccaccacgcgctccgcgactttatgtatgctctcggtaatgtgcattcccgggtgctgcggccccagcaaacgatcgacaaggttgcgtagcctgtcggcctgttcaatgatgactttggtatattccgttagcgccgggtcgggcagcgccttgctgagtagctgcgccgcgccgcgcaggccgccgagcggatttttgatttcgtgcgccagaccgcgcaccagatcgcgggcggcgatttgctgcgcgtgctgcaactgctcctgactcagacgacgctggttatccatcggcgccatttcgagcagtataaaatcgtcgggcagacgttgggcggtcaaagagagaatatgcgagcgactatcaatcaccagcgtcacttcgttatcggtaaagccttgccctgccgctaaactttcgcgcatcaggtcaatgtttaacgaaaaatagctcaacagttcaggtaacggcgtcccgaacagtttgcgtgagctttgcgcgagcaactgctgcgcggcaggattggcgtaatggattgccagcgcgtcgtcgaccaccagcacgctgttgattaacgaattgaggatctgcccagcatcgggctgtatgccgcttgccattcagcagtctcctggaaaaggttgcaccattttagtgcattatagctttttaccactaaaaagcgcgtgagatcagattgttggtggagaaaaaagcccatcctgggatgggctgaaagtttccacggcaactcaaaaactcctgacgcctttcacgctgctgctgcgttggctgccttcgcttaccccagtcacatcgctatctatgctcctggggatgtgctcagttgctgccttgcagcaacgcgaaatttgtcggatttttaatatacgattaaacgctgtagtacagctcaaactctaccgggtgcggggtcatacgcacgcggtcatcttcttcgcgacgcagcgcaatatacgcatcgatcgcttcatcagtgaacacgccgcctgctttcaggaactcgcggtccaggtccagcgcgttcagcgcttcttccagagaacccgctacctgtgggatctctttcgcttcttccggcggcaggtcatacaggtttttgtccatggcttcgcccgggtgaatcttattcttaatcccgtccagaccggccatcagcagggcggcaaagcacagatacgggttagccgccgggtccgggaagcgaacttcgatacggcgcgctttcggagacgccaccaccggaatacggatggaggcggaacggttacgggcggagtaggccagcatcaccggcgcttcgtaacccgggaccagacgcttgtaggagttggtggtcgggttcgccagggcgttgatggctttggcgtgtttgatgacgccgccgatgtagtacagcgcttgttcagacaggccggcatatttgtcgccagagaacaggttggtgccgttcttcgccagagacatgtggcagtgcataccggaaccgttatcgccgaacatcggttttggcataaaggtcgcggtcttaccgaagcggtgagccacgttatgcacgacatatttgtaaatctgaatttcgtcggcttttttggtcatggtgttaaagcgggtcgccacttcgttctgacctgcggtcgctacttcgtggtggtgcgcttcaacgaccaggcccatctgctccatgaccagacacatttcagaacggatatcctgcgcggagtcaactggcggaaccgggaaataaccgcctttcacgcccggacgatggcctttgttgccgccttcgtacttggtagaggagttccaggcgccttcaatatcgtcaatcgccacatgtgagccggagatagatgcgccgaagcggatgtcgtcgaacaggaagaattcaggttccggcccaaacaggacggtatcggcgataccggtcgcgcgcaggtagtcttccgcacgttttgcgatggaacgtgggtcacggtcataaccttgcagagtgccaggctccaggatgtcacaacggataatcagggtggagtccgcgaagaacgggtcgataaccgcagtggacgcatcgggcatcagcaccatgtcggattcgttaatgcctttccagccgccgatagaggagccgtcaaacattttgccttcttcaaagaattcggcatttacctgatgagcaggaatcgtgacgtgctgttctttgcctttggtatcggtgaagcgcagatcgacaaacttcacttcgtgctcgttcagcatcgtcaaaacgtgttcagcggacatacttgtactctcccggattggtcatggtcggtcgtcgtggtaacgagatcttcaattctgctggccgtgtcgccgtaaaaatataaagcgaaatctgtgccaactttcacattgcccccaaaaggcgttatcatgcgcaccatcgtgcaaaagggctgcaccacggtgactatgttgcaccaaaatagtgctttaatgtgaacattaagcaccacattggtgcaacagaacgcaagccacccttttaacgctccgtgaaagcgatcacaaagagactctgcaatacttgtttgcggaggatgtttgtgatcctgttttgtagtgcgattaatccgtgtacaataacgcgctatttctaatgcctgaggcaaagttgtgatcgaaaatttgcgtaacatcgccatcatcgcgcacgttgaccatggtaaaactaccctggttgataagctgctccagcaatccggtacgttcgacgcgcgtgccgaaactcaagagcgagtgatggactccaacgatttggagaaagagcgtggtattactatcctcgctaaaaacaccgctattaaatggaatgattaccgtatcaacatcgttgatactcccgggcacgctgacttcggtggtgaagtagagcgcgtcatgtccatggttgactctgtgctgctggtggttgacgcatttgacggcccgatgccgcaaacgcgcttcgtgaccaaaaaagcctttgctcatggcctgaaacccattgtggttatcaacaaagttgaccgtcctggcgcgcgccctgactgggttgttgaccaggtattcgacctgtttgttaacctcgacgcgaccgacgaacagctggacttcccgatcatctacgcttcggcgctgaacggtatcgcgggtctggaccacgaagatatggcggaagacatgaccccgctatatcaggcgattgttgatcatgttccggcgccggacgttgacctcgatggtccgttgcagatgcagatctcccagctggactacaacaactatgttggcgttatcggcattggccgtatcaaacgcggcaaagtgaagccgaaccagcaggtcactatcatcgatagtgaagggaaaacccgtaacgcgaaagtaggtaaagtgctgacgcatctgggtctggagcgtatcgacagcaatatcgccgaagcgggcgatatcattgcgatcaccggtctgggcgagctgaacatttccgacaccatctgcgacccgcagaacgttgaagcgctgccggcgctgtccgttgatgagccgaccgtgtctatgttcttctgcgttaacacctcgccgttctgcggtaaagaaggtaagtttgtgacttctcgtcagattcttgaccgtctgaacaaagagctggtgcataacgtggcgctgcgcgttgaagaaaccgaagatgcggatgcgttccgtgtatccggtcgtggcgaactgcacctgtccgtgctgattgaaaatatgcgtcgtgaaggtttcgaactggcggtttcccgtccgaaagttatcttccgtgaaatcgacggtcgtaaacaagagccgtacgaaaacgtgacgctggacgtcgaagagcagcaccaggggtctgtcatgcaggcgctgggcgagcgtaaaggcgacctgaaaaacatgaatccggacggtaaaggccgcgtacgtctcgactacgtgatcccaagccgtgggctgattggtttccgttcagaattcatgaccatgacttccggtacgggtctgctgtactccaccttcagccattacgacgatattcgtccgggtgaagtgggccagcgtcagaacggcgtactgatctccaacggtcagggtaaagcggtggcgtttgcgctgttcggtttgcaggatcgcggtaagctgttcctgggtcacggcgcggaagtttatgaaggccagattattggtattcacagtcgctccaacgacctgacggtaaactgcctgaccggtaagaaactgaccaacatgcgtgcgtccggtacggatgaagcggtgattctggttccgccaattaaaatgagccttgagcaagcgctggagttcattgatgacgacgaactggtagaagtcaccccaacctctatccgtatccgtaaacgtcacctgacggaaaacgatcgccgccgtgcgaaccgtggtcagaaagaagagtaattaacgctcttacggataaaaaccctgccgaaatgaaagctcggcggggtttttttattcacgttgagaaagggataaggttgccaaaaaatcagcaatcgctggcgtattatgccgaccaatgacgctatccgcatacacctttgcccgagcgctggcattccccatcgcgacgcccaatccggctaaacgtagcatttccgcatcgttatcattatcgccaaacgccatcacttcgcgcattgcgatatgctgttgctgtgcatatctggcgaggctttgtcctttgctacaccccttctggagaatatccagttgatgatgccaggaccaggtacagcttagatgtaattcatgctgtataaactcagcaatattttgtagttgttttatgtgccgatgaacgatgctgatttgccagatattctccctactgcttagctcatcagcctgaaagattattttatcatcagcacgaattgtcggtttaagcggatatacccgcgccagtattttttccgtttgtaagtgcgtcagcggcagcgggtgaaggatctgctgttgagccggttgataaatatagcttccgttacaacagatcatcggttcggtgagcgccagcgtttgataatacgcataggcttcacgatgagagcggccggtgacaagcattattcggcagcccatgtcctgcatctgacggatggcggttagcgactctggcagaatttgtttattacggtttagcagcgttccatcaagatcaaaagcgattaaacgatatcgcatgagcgtccgatcctaaaacagcgtgaggcatccaggtgattcagcaatggaatatcgagacggtgctgataagcgagaaaacagtggcattgctttgcctggcaggcgggagaattgagccgttgttgatataaattacccattttaattttgctgatatgacaagcaaaaagatcgccttctgcattcataaaaatactttttcttcctgcggtacagatatccagctgcgctggccactgctgcgtttcaatcacatacagcggatcgagttcgccgaaggcgatggtttcctcaacggtatgccgggtattggcacactcgttggcgttaaaccaaaaataattctggtcaggcaactgctggcggagccaacgaaactggtcgatatctttcatactggcgacagcccccgcgcaccaggttattccggcggcagagagcgctaaacactgctggagaaagcgctcagcggtaatttgtgagggatgaaaagaacaccataaccgaagctttgagatatctccgccgccagcacgaaatgattccagcaatgacattaacgaaaaagaggcgttagtttgtatgccgaccgcctgaacatgaggatagcggctaatttctgccagcgccgccatgtaataacgcaagcgtagcgcctcgccataaggcgtaatcatcacattcaacggcgtacctaaaagaggcaaatggtcaaccatgcgccatagcgcggcttcgtcgcgttttttatcgttacgggcgtgtttatggaacgggcaatagccgcaatgataattacacgatttaagatagccgcgataaaacagcgtgtgaatatcgcgcagggcgggggcgctcatctctgccgattctcccgtagcatcacctcaggcgaaacgaacacaggagcaaggcaatcggataatgccataccggtctccgttagccggaggcgactgccattctgatagcagtaaccctgccgtatgaagcgttcaaggtcggggaaatcccttagcgcatcgctggcaaaatattgctgataatcgctaagagaaagtccctgccagaaaaatagatttttaatgataaagcggcgtttcatttcatcagggggaagcagataaccgtgattaatgacggttttatccgggctgtcgataaacgcctgaatgatttttcgtgatgtttgcaggttcgacgaccacggtgaacagtaatgcagattgccaagataacttctgccgcccgcgccgagcgccagtgagttttcaaatccgcagctttccgccgcggcggatggcgctggattaaggacgaaacggcgcatggacgtttgggtgtagcccgcgttgcgtaaaagatcgcgggctaaaacgtagtagctatgcatattttcctggcgaggcatattataaagcggataaagaaacagctcttccggttgataaacgagcgcctgatgtaatgattccgtcaggcttgcgtgagtctgtccgggaatgccataaataatatcaatattgagtgatggaaaatgacccgcctttagccattccagcgcctggtgcgcgctggcggcattgtggcggcggtgcagcgtatgtaactcgctatcatgaaaactttgtacgccaatactgacgcgattaacggaaaaggcgtttaatagcgctactttttctgctgtggtatccgtaggggaagtttcaatcgttttataaatattccagtcaacattgagcacatcaaagacggaaaaaaataacttctctaattgcgcaatatttaatagcagaggtgtgccgccgcctacggtaaagcttgcccagtgggcgggcgccagcgccatttgtcggccctgggtaataatcgcgtcgatatagctatcaatgaacgtattatctgcgccagtgcaggtaaataaattacagaacccgcagcgactttgacaaaagggcatatgaacatacagatgtgtgtcgtgctcgtaaatgcgcggttttacttcgctaaagctgacgttctccagctcccgataagccgtcttatgcggataactgtacatatactgacgataaatatcattgttattcatattaatgattacagctcagcaagaaatgcatatagggaacggtattaacgatcggatgattaaaactatggaaatatttcccgtcttcgccatagcaggtaccgtgatcggaacagacaataacgaacgtttcgccgccagtttggcggaaaatgttcagtaatccgtcgatgcgggcgtcgatatagcgtagcgcggcggcatgggtctcaacggtatcgccaggggccgcgccctcaacgtaaaaatggttagggtaatgaatcgtgtcgatattgatatacatcatgaccggttggctgccagcacgctcggccatgattttctggatataatggatctggttatccatactctctttaaccgtacaggcaaagcgtggatgccagtaactctctttaaacatcgacgggaacacttttcccatgccggagcggttattaaagaaagagacgccgccaatacagatggtctggtagcctttattttccagactttttatccatgttgcgtcatcaaaggcaaatgcatttttcgggcctttacgaccaagtccgatatcttttgggaaaaacagcatggtctgattaacggtatcatcaataggttttggcataaaacctgaaaacatggcgtgatgcgaaggccaggtaaaattaccggccgcttcgcatttcgtccattgtccataatgattaaggttgggcgtatttccggcggtttgttcctgaagcgcaatgtcgtagcgtaacgagtccagcacaataaaaagaatatgagcgttattactaattagcgcattcatatcgaattcgccatcgcctgtgtcaatcgacgcgtgcagcgagacggggacttcatccattgaattatacattttgcttcctcatggcccggatttgcgcctgataaattagattattctgctgcgcatcctgataaatcaaatcaccctggccattaatttcaataatatacggcgtcaggctggtggtaagtaaaacatcaatacccgctaagcgaatgccagggaaaagtcgcatggcattttgacagagcgtatcgatctcagtcacttttgcggcagataactccagactttcgaagcagtaagcctggttttgcagatgtaagttagtaatgggctgcgaggaggttctgaccactcgccagataatttcgccatccaggcagacgatgcgtaaatcataggttttatgctttacgctggctttgggcagccactgttcgacgaggttttcctgctgaagaacgccattaataatgagctggatatcttctttctgacgatactgttggatttttttgctgttaaatagctgttgtcctgatatgacaatcgcgctgtaaagcacctgctttatgccatcagggtggcggcgcaaagcgataacgcccgccgcgccagaacccagcgagggcttaatgaacacgctggcgacccttttttcctccatgatggcggtgagctgtgcaaaactttttacgtcttccgctaccaacggcggcgtggggatgccgtgttccagtaagcgccgcttgcagcgttttttatccaacaggtgaatgaggcccgccggatggttaagccaggtgacgccaggacgcgccgccatgttctgcaaaaaatggatatagtccagaccgatcgcgtttattttgcggatgtctgtttcactgtgtactggcgggtcgattttaacgatgccagaggtcagcgaagcgtccagcgcttgcggatgagtcagcgccgtgacgggttccccaagtacggcggcagcctgcataaaataatgcgtgcgcttgctctgatgggggccaatgagcgtaatcacaataaatccctttatcgttgagtaggggaatgtgcacattcccctactcaatcactcggtgtacatcgcattcatataaatatcgccatcgtaatcatcaggctccagagcttctgaaagattcaggtttatcggcagtgtggcttttagcttttcctgcatctccggcgtcaaatagtggtggtggagatcgagtgtttccagatgcgcaattcggtctttatgctccagcagcgcctctgcgccgttgtccgttaaggtaccgcatgagagttccagcacgttaagctgcggcaggatattactttccagcacccggcgggcgatatcatcctgctcttcgctgttcatcaaccccagatgggtgagctgagggaaaagatctttcgatgccagcgccatcacgtcatccagcgaaccgtcaaaaccgtatccctctacgcccaggaagagcttcagcgtttttaatgcagggagctgcgcattttgtagttcggcaagtacgttagaagggatgccgccggaaatgatttccaggtgctccagtttctcatgatgtatagcgcccagtcgcagatccgacgcgcctttaataatcagttctttcagattgggtaacgccgcatagagcctggaatagtcaccttgtttaatccaggagatctcgcagtcttcgctctccatatcaccgataaacagtgattccaggtgagtaaagcgggaggcgttctccacaatcatatcaataataggctggcaggtttcgtcttcccaacaatcaccccagttaccaatggtcagtgagcgaagctttggcagatcttcatcggttaaaatcaaattaatgagctgttcctgggttaattcattgtcccaatcaatattaaatcgcttattcatttgtttcccttctctataagcatgaatatggtaaaacgctttgcgaatattatcatggcgcttaggggcgggatatcgggagtctgattcaggatgaatgagcgggcagaacaactacccgctgtgatgctgattcgtaaaatagaggcaataatatcagaagaaatacttcgccccgatacgaatctggttttgctctctatggtaggggcccacgttacgatctaaccagcgtaattcaaagtagggcaaccagtgttcattgatacgataacggaaggtattagtgatttcccaatgatgcttcgtaccattactactattaaaatcattaacgttataaaaatagtgtggttcaaaggtataagaaaatttatcggtaatgataaaattccaatagttaccgatttcatagctgtcattattatccagttcgccattcaaatcggttgaactataattattgtgattatatcggttacgtaccgtaagattaaaccacggggtaaatttatagttaacatccagatagacggcgccgccggaaccaatgcttttgtcgtttattaaccccccaggctggatggttaatttatctgtaggtttaaataatggataccagccctcaatctcattataaccgtgctttaattcatcatcacgctgtagcgtataggtattggtcaacataattccggcccccatatcggagttatagccgacgcgcagcataaactccatttggtcagacgccaggttataggcctcacggttttctacataagcgccagcaaaaacagaggtggatattactgaagttaatatcactagagtattcagagatttcataataaatccatttttcaaatatagggaagccgccatccatcgggatggataaagcggcaagcgtcgtttaattatttacagtagaaatactttgtttattattagtcgcgacaatttgattacctgttttctttcgttgggcaatttcctcgataataaaagcgaaacgttgttcattgagcttataaaaaaagcccatcgttagtgctgcgataatggcaagaccgcaaggccataaaaaaatgagctgacgcaaaccaagcaacgtggtgtcactttgagctatgttggggatataaccgatttgcgtcagcataatacctggcaaaaagccagcaagcgcagcggaaattttgcgggaaaaggtataacccgtatacaccgagccttcagcgcgaatacccgttttccattcaccgtagtcaaccgtatccggaaccagcgcccagttcaggctgttgacgaaagcggtaccgaagaaggcgatacaagagaaaataacaaacaggaatgacgttccaccccagataaaattcaggatatcgccaacggcccacaatatcagaccaccaagataaacctgttttttcccgaagcgttttaccgcagcaggtactaataaaacaccaatcaggatacagcccatgctgaaaaaacccatccatgacaacaaatgaatatcgttcagcacgtactgagtgtaataaacctgaatggccagcttgatattaaaggcggccagcgtgcacaaattggcaacgcagagcaccagcagcggcggattacgaaaaatcgcgcagaaggacttcaatatgctgggtttatgcgtgtcaggtacggtttcgatataccgttcttttaccccgctaaagcaccaccacatgctgaacagcccgcagaccgaaaagatgactgctgcaatcagataacccagcgaaggggaacgggtaaacagcgcctgaatgggcataaaacctacggtacaaagaagaaggccaatggtagcgccgccttgtcgccatgcggcgagctgggcgcgctcatgcggatttttggtaatagcgggtaccatcgcgccgtatgagcagttcatcaggctgtagaacagaccgaacaacataaacagcaccgtcgcgaaggctgttttaacgggtaaagtaaagtgagtggcaaagaattgcgcagtagcaaccagagcgactggaaatgacgcatacagaataaaaggccgaaactttccttttgcgccaatattacggcgtgagtccagcaatacgccggtgagcatatcggtaaaagcggtgaagaatttcgccaccagaaagataattccaccgtaatatgcaggcatcccgagttcatcggtataaaacttcagtagatacagcgtaccgatacacagcatcagatttgagccgaaatcgcccacgccataggcgcatttttcccgcaggctcaactttagcgttagcggatcatgattagacataatcgcctctcaaaacgccccgcagggcgttatattttattgttgttaaaccgtatgtttccgggcctcaatctcttccacaattcgcacgtacatcttctcgttgaggttgtagaaacagcccatcgcaataatggtgatgaccgccagcacgcaaggataaataaagatcaactggcgtaggccttcgacggtgcctgccgattgcaccacattcgggatataaccgatttgcgttagcatccagccggggaagaaccctgccagcgcctgggagaccttacggaagaacgtgaagccggtgtaaaccgtcccttccgagcggacgccggtgcgccattcaccgtactccaccgtgtcggaaaccagcgcccagttcaggctgttgacgaaggcggaaccgaagaacgccaggcaggagaaggcgacaaaactgaccgagccgccgccaaagaagtagttgagcagatcgcctgccacccatattaacagcccgccgatatagactttcttcttgccaaaacgccttacagcgccgggcatcaaaaaaacgccgataaaaatacagcccatgctaaagaagcccatccaggagaggaggatcgggtcgttaagaacgtactgggtgtaataaacctgaatcgccagtttgacgttgaaggcgccaagagtacaaaggttggcgatacacagaataaacagcggacggttaccggcgatggcgcggaacgactgcaataatccaggcttttgcgcgctatcgacaggtttcacttcgacgtagcgctctttaacgccggcgtagcacagccacataaatagcaggccaaacaatgaaaatagcgtggcggcgaaaatatagctgagttgggcattgccttcgatcaggttcatgaccggcacaaagccaacggtacacagcagcaggccgagagtggcgccgccctgacgccaggcggcaagcgaggcgcgttcatccgggttcttggtaatcgcgggtaccatcgcgccatacgagcagttcatcatgctgaaaaccagcccgtacagcataaacagcatcgttgcgacgacggtttttcccgtcacctcaaacggtgtgccgacaaagttagcaatcgccagtagcgttaccggaaatgccgcgtaaagcacgaacgggcggaatttgcccttcggaccaattttacgccgcgagtcgagcataatgccggtacccatatcggtaaatgcggtaaaaaatttggcgatcaggaaaatgatcccgccgtaagtccctggtaaacccagcacatcggtataaaatttgagtaaatagagggttccgatatctaacaggatattagaacctaaatcccccagtccataggcaagtttttctttaaacggcaagcgtagggttgccggattcgatgatgtttgactcattattcttctccatctgcccgcaggtttccctgcgggcgagccgtattagatattccgtaaagaagcaaaaagtgaagcccactcgctcttcgcgcgatagaagaccggcggcttgccaatgggcgcatccacggtaatttcaccgccgtggtgagcttcgccggtccagatattcacccagtgatcttccggcaggtacagcgtccagtcgcaacgcccctgctcgtgaaccggcgcgaccagcagatcctgaccgagcagatattgatatttcagggtgtaggttgcggcatcgttctcgtaatgcaggaatagcggacgcatgaccggcagaccggtagccgcgttttgcgccaccgcctgcttgagatacggtttcagcgtggtaaagacggtggtcatgcgggcaaagtgggcaatagtttccgcgtcgccgtcgaactgccagttatcgccggggcggttgccttcatgggtgcgcatcatcggcgtaaaggcgctgaaatcgcaccagcgcagcagcaactctttgctgcgtttcatgtcaaacagggtggtgtagccgccgatatcgctgtgatgcagaccatggccggtcattgccagcgacaatgccgcaggcacgacagaggccagaccatcatcaaggctccagtcaacgttctggtcacctgcccacatcatggtggaatatttctgactgccggtgtaacccgcacgcataaagaacaggatctcgccgagcttgccggtctcctgtagcgcttcgtagttacatttcgcccagagcgcaggccaggcgttatgcatgatctcggcgctgacgccgttgtgcagatacgtgtcggtcggcagatattcgccgaaatccgccatccagccgctgcagccgagcgcgatcatgctctttttgatgacgtctttgaaccagtcgtaagcttcaggattggtcagatcgaccacgccgccatagaattcgccaaactcgaccagatagtcgccgcccgtggcgtctttcgccagatagccgtgtttcgccgcctcggcgcagaggtctttatcactggcgacgtatgggttgatataagagaggaactggacgccttcttctttccactgtttgatacggctatccagctgtggatagttgtcgctattccacttccagttccacatcacgcgcttgccaaaggaggtcatgcggataccggaccagtcctgcgcccaaataccgttcacttttacgcctgcgttgcgcatggtatccagtttttgctggcaaacttccgtaccgccctgaatgcctagcgtgacgccgtcgtaaacccagtccggcagctccggctggcgacctaacagcgcagtcagtttttccagcagggcgatgtaggtgtcggcacactcaaaacgtagcgtagttttatcttcccacagcgccagttcgtgatactccggcgcgctgaagtcgaaattcatatagcagctattatcgacgtggcagtaatacttctgcgtgctgacaaaggtcggttgcgggaagaaggtccagtaatagtcgccgccggcgttctctttacagtctgcctgccaggtgacatagctggttttattacggccaacgccctgttcgctggtccacagcgggaacggcttgccgcgcaaatcgaaataagagaactgttcgccgcagccgtagatatggtcgtctggattagctgcgagacgtaaccagatacggttatggtgcaggtcgtcgttttgcagatccagctgcaggcgtcccgcttcatcggcggagatgcgaagggtggcgctaattgttgcgccacggctgaattgtaccagccagccgtcaggtagctcgctgacggtggcctccgttaatgcaatcttttcgttaagtttgtctttgatgctaaagttgccgcgaaacatgtcaatgtcggcaacgcccgcgccaatccacagacagggattttcggtgctgtggcgtaaaatcaggcgctgttgccagctaagcgcaaaaccatcctgtgatgttgtcagttcaaaatcggttgaccgttgtggtagagaattcattgtaatctccgtgaatgtagggtaattcggtaatccatttgggctagtcgcagccgatggaaaaatgcagttgatggatcgcttttggggcaagatgaatcagtgcgatcccggaattaaatgcatcgggcgggcagctcataggctctaccgcgagaccttttcggctgagtttttcgccggtatagatctgtaaccagggctgggtgctgcgtaaaaatgtggacatgttctgcgttgggctggtaagtctgacctcccactcagccggggtagtcgcggtcttaaccgcatgatcaaggcgcgtttcgccgagcaggcatgatgcggaaaaatccctgcctgcgggcaattcttcgcttgcaggcagtgttaatacacagctatcgatgctttgcagattgcaagtcaaataaggatgcgcgcccgcgccataaggggctgattcatcgccaatgttttgcgtacgaatcaatacgtgcagcccactggcggcatctaaccgataaatcacttccgatatcaacgcaaagggatagccgtaagagggcggcagaaaaatcgttagcgacgcttccgtcgccgactgataattaatctgccagtctcgccaggctaacagaccgtgaatggcggtctgcgaaaccgggtcgttaacggcaagctggaaaaccttgccgttataggagtagcagccatttgtcacgcgatttggccagggaatcaatactttccccagatgcgccatgggtatttcttccggtttatgcgggatgaccacatggcgtccatgatgggtcagttccgccagacctgcgccaaccgtgacgattttcgcctggtaatggcccgcattaagctgaatagtttttccaccgctgtgcatggctgccatcctcatgacctatttcgcgttgatatccaggagacccgccgcgaccgccggagccaggcccggcgccagtggcagacgaggaatgaccagacagtgcagcagatggtaaatatcttgcttgccgtcccacactttggtggtcactttgttatcggcgtccagctcttgccaccaggaaccattttcatagtccatcaggtacttaatgcagtagtcccaccatttctgataccactcttcatactggctatcgtccgtcagggtgtagagggcgtaggccgtacccatcgcttccacaatcggccagcgcacgcgttcacgtacgataggtttaccgtcccagtcgactgagtagacaaagccgtctgcgccatctggcgcccaggcgtcgcggatagtggcatggaacagacctttcgcatcctccagcagccaggcgggtggcgtttcgaagcgggcctccagcgcagcatggagatggagcatcagacggccccactcaatccagtgaccgggcgtaccgccgtaggcgcggaaacggtgggcaggattatctttgttatagtcgcggatagggttccactgtgaatcgaagtgttcattgacgcggtaatcaccgttgcgcgccacatcatgaataattaccgacgcgatacgcagcgcgcgatccagccattttttgtcatgggtaacgtcataaacaatcaggaacgcttcgacggcgtgcatattggcgttgccgccacggtagtcttccgtctggctgaaggcttcatcccaggactccaggcacatctgctcttcttcactccagaagtatttctcaatcacttctatggtgtaatccagcaatttcctggcttcaggatgcccggtcgtgacggcgctggccgcgcccagcaaggcgaagaagtgttgataaccctgtttagaggcatctaccacgccctgatcgttaacgcaggcataccagccgccgtattttttatcgcgcagcgcgccgttcatggctttgatgccgtgatcgaccagatcataagcgcccggtcggcccatcgacgccgccacggaataaacgtgcagcatacgcgccgtgatccaaagatgggtgcccatctcttctttgatttgccctttatttcccagccagccgaagcctgtcggcaccacggcgtttttaccgaaattaaagatgcggtcggtttcctgctccagccagcggttgtggctcaacgtgttaaaccatttcattctgtcatcctcgtattaacgacgttttgccatcatttcatcgacgatctcgcccagacgttgcaatttaggcgcggaaacatcacgtagcatcagctcggtatccggtaaaccaattactgatgaccagaccgcgcgtcccgccaggaacccggatgcgccagcttccatggcgaccctgactgcgcgagggaacagtttttcgtccacaccggaagagaggatgacccacggcatattgatatgcccattcaggcgttgtgaggcggtaagaagatcggaacgtgcgcctttgccgtagagcggcatttcaactttgtaaagatcggcgccgctgtcgcccagctctttggccgcatcgataatcgcctgctcgcgatcgaacttgtcgccgcagcgcggcggacgtacaaccggttcgataatgctcagcaaaccattggagtgacataattcattgaattctttgaccatattcagacgctgctgcgcgtcttcgtcgctgcgccacagcaccaacagttttaaggctttcgcgccgtcccgttttaccgcctgcgcattaatttttttatcaaggaccacgttatcaacgggaataccgttgcccgggatgaaatcatccgccgcgacgatcatggcgcagcttttagcgaccgcgttttgttctacggcctggcgataacagaactgctgatccagcagaacggcagaggcatacggggaaagaattttcgccgcattcactttgaaatccgtcagcacgctatcggcaacgggtgttttcgcaccagcagcagcaaacattaaacgcatcgcctcgcgctgatcgacagccagcatggcaaacccgccggacgctcgcgtaatgtctttgatggtgtagttgttcattcaattttcctttatacagtcgttacttttttacgttggcggtcagcccggcgctgatgcgcacctgttccaggatggcgctccagtcttcccgaccgcggcctgcggcccgcgccaggttataaacttcacgggaggcggcgccgagcggcatcggtacgtgcagttgattggcgacatccaacgcgatgccaagatctttgtgcgccagatcgatcatgaaggcgggagacagatctcctttcatcactttattcggccaggtggtggtgaaatgccctttgcctgcggcagtgccgctcatcacttttaaagccacgtcgaaggaaagccccagcgcttcacacagcacggcggcttcggcggagagcgcatttagcgcaatactcatgtagttgttgatcagttttacgcgaatacccattcccgggccgccggtgttgaccagctcattacccatcgccatcagaacaggggtagcacgctctacttgctccgccgtaccgcctgccagcagcaacaatgtgccggtaatcgcgttgtcggatgtccggcctaccggcacatccatcatgctgaaccctttgctctgcatgtcggcaatcagattatcggtttgcaacggatgaatagtggacatatcaatgaccagcgcttcacgggaaagagtttcacaaacgccttgctcgccaaacaaaacggaacgaaccagatcgccgttcgggagcatggtgataacaaattcagcgccgatggttgcctgagccgggctgcttgcaggttgcgcgcctttgtctaccagacgctgtacggcgtcgggattaacatcgaagacgctgagttgatggccctgctttagcagattgctcgccataggggagcccatctgtcccaacccgataaatgctataactgccatatcgttctcctgaacacggtggtgtcattttttgtcattaatgagcatttttctgtctgtttgtgatcgtatttgtaatttatagtcaaaaaattgacagccgtcactttttaaacatttcgtgaaattaaaatgagcacatcgaaaatgcttgaggaatgaccatggttcgtattgcttgtgtaggtattaccgtgatggatcgcatctattacgtggaaggattaccgacagaagggggtaaatatgtggcgaagcgctatacggaagtgggcggcgggcctgcggcgaccgctgccgtggctgcggcgaaattgggcgcacaggtggactttattggccgtgtgggcgatgacgacaccggaaacagcctgctggcggaactggaatccctgggggtaaatacccgctatacccgccgctacacgcaggccatgtcgtcgcagtcagcgattatggtggatgccaaaggagagcggattatcgttaattatcccagcccggatttattacctgacgccgactggcttaacgacatcgatttttcgcagtgggatgtggtgttggcggatgtgcgctggcatgacggcgcaaaacaggcgtttacgctggcgcgtcaggctggcgtcatgactgttcttgatggcgatattacgccgcaggatattagcgagctggtggcgttaagcgaccacgccgccttctccgagccagggctggcacgcctgacggggatgagcgaagccattgatgcgctaaaaaaagcacaaatgctcacaaatggacatgtctatgtcacgcgaggcagtgaaggctgcaactggttggaaaaagcggcggtacgccaccaaccgggttttaccgtggaggtggtggatactactggcgcgggcgatgtttttcatggcgcactggcatttggcctggcaagcggatacgccatcgaagaggctgtcagattcgccagcggcgttgccgcgctgaagtgtacgcgcccgggtggccgggcgggtatccctgattgtgagcaaacccgatctttcttgtcactttttgtataatatgagcagtaggaagcttttagaggaatgctcatgagtcttaccgaactgaccggtaatccgcgacacgatcggctgttaatgctaattgatgagcgcggctatatgaatatcgatgagttagccagtttgttggaggtctctacccagacggttcgccgcgatattcgtaaattaagcgagcaggggctgattacgcgtcatcacggcggcgctggcagagcgtccagtgtggtcaataccgcctttgagcagcgagaggtctcctggacgcaagagaaaaaagccattgcggaagccgtggctgactatattccggatggctccacgatatttatcacgattggaacgacggttgagcaggtggcgcgcgcgctgctcaaccataatcatctgcgcattatcaccaatagcctgcgcgtcgcgcacattctttataataaccctcgttttgaagtgatggtgcctggcggcacgctgcgcccgcataatagcggcattatcgggccatccgcggcggcgtttgtggcggggttccgggctgactatctcgtcaccagcgtaggcgcgatagagagcgatggcgcgttactggagtttgatgtcaacgaagccagcgtagtgaaaaccatgatggcccactcgcgacatattttgctggccgccgatcatacgaaataccatgcttctgcggcggttgagatcggcaatgtgtcacagattaccgctctgtttacggacgagtatcccggtccggcattacagaatttacttcaatcccagcaaatcgaagtggttcaggtgagtccttcgctggacgacgccgtttcagcgtgacaagcgcccttgcgccggagggtcgcgtcagcgctttatccggccaataaaacggcgctgtgatgcaggcgatattgaacatcgtctgcgtttctattgtctttttgttaattgatttataaagggatacatagtcaaacttctcctttcccgctacagttattcatccccggttagcaaggagaatgacatgctctacatctttgatttaggtaatgtgattgtcgacatcgactttaaccgcgtattaggtgtgtggagcgatctgagtcgagtaccgctggcttcgctgaagcaaaaatttacgatgggcgagacttttcaccaacatgaacgcggtgagataacggacgaagcgtttgctgaagctttctgtcatgaaatggcgttatcgctcagttatgaacaatttgcgcacggctggcaggcggtatttgtcggattacggcccgaggtgattgctatcatgcataaactgcgcgagcaggggcatcgcgtggtggtgctatccaatactaaccgactgcatacccacttctggccggaggaatacccggaggtgcgcgctgccgccgaccatatctatttatcgcaggatttgggaatgcgtaagccggaagcgcgtatttatcagcacgtcctgcagaaagaaggtttttccgctgccgatgcggtctttttcgacgacaatgccgataatatagaaggggccaaccagttggggatcaccagtattctggtgaaggataaagccaccatccctgactatttcgcgaagctgttatgctaaaaaccgttcaccaaaaagctggacgccatacgcgccctgttcgggcctggctcaagctattatggcagcgtatcgatgaggataatatgacgactctggcgggaaacctcgcctatgtctcattactctccttagtaccgcttattgccgtcgtttttgcccttttcgctgcttttccgatgttttctgatgtcagcattcagttacgccattttatttttgctaactttatgccagccaccggagacgtgattcagcgctatattgagcagtttgtcgctaattccaacaaaatgacggcggtgggcgcctgtggactgattgtgacggcattgctgttgatgtacgccattgatagcgccttaaacactatctggcgcagcaaacgcacacggccaaaagtgtactcttttgcggtgtactggatgatcctcacgctcggcccgcttctcgctggcgtcagcctggcgatcagctcctacctgctttctttacgctgggccagcgatctgaatacggtcatcgacaatgtattgcacatccttccgctgctgctctcgtggatctcattctggttactttacagtattgtcccaacgactcgcgtaccgaaccgtgacgcccttgtcggcgcgtttgtcgcagcgttgctgttcgaggccggaaagaaaggtttcgcgctttatatcaccatgttcccgtcatatcagctcatttatggcgtactggcagtgatccctatcctgtttgtctgggtatactggacctggtgtatagtcttgcttggcgcagaaataactgtcactctcggggaataccgaaaactcaaacaagccgcagaacaagaagaagctgaccaaccatgattgcattaattcaacgcgtaacccgtgccagcgtcaccgtggaggacgaggtgacgggtaaaatcggcccaggacttttggtgttattgggtgtcgaaaaagaagatgacgaacaaaaagcgaatcgtctgtgcgagcgcgtgctgggataccgtatcttcagcgatgctgacggcaagatgaatctgaatgtacaacaggctggcggcagcgtgctggtggtgtcgcagtttacgctggcggcagataccgagcgcggtatgcggccaagcttttccggcggggctgcgccggatcgcgcgcaggcgctttatgaatattttgtcgagcgctgccgccagcaggcgataaacacgcaaaccggacgcttcgctgccgatatgcaggttgagctggttaatgacggccccgtgacattctggctccaggtatgagtcagcttccggcgtggccgcggataacaagagagagtacggctatgtatcaccttcgagttccgcaaacagaagaagaattagaacgttactaccagtttcgctgggagatgctgcgtaaaccgctgcaccagccgaaagggtcggaacgggatggctgggatgcgttggcgcaccatcaaatggtggtggacgaagaaggaaatttagttgcagtgggccgcctttatatcaatgcagataacgaggcgtctatccgttttatggctgtacatccctcggtacaggataaagggctggggacattaatggcgatgaccctggagtctgttgcccgccaggaaggcgttaagcgcgtcacctgcagtgcgcgcgaagatgcggttgagttctttgccaaactcgggtttgtcaatcagggggagattactacgcccacaaccacgccaatccgccattttctgatgattaaaccggtagcatcgctggatgatatcctgcatcgcggcgactggtgcgggcagcttcagcaggcctggtatgagcacattccattgagtgaaaagatgggggtgcgcattcagcagtacaccgggcaaaaatttatcaccacgatgccggaaaccggtaatcaaaatccgcatcacacggtgtttgccggcagcctgttctccctggcgacgctgaccggatggggacttatctggctgatgctccgtgaacgccacctgggcgggacgattattcttgctgacgcccatattcgctacagtaaacccattagcggaaagccaaacgccgtggctgatttggggtcgctaagcggtgatttggacaggctggcgcggggtaaaaaagcgcgtgtccagttgcaggttgaactgttgggcggcgagaccgccggagcaattttcgaaggcatttatatcgtactacctgcgaaaccgttcggcccgtatgaagagggcgggaatgaggaggagtagctggacatatccaactactcgatgaaggcatctgctggtagtttgaagcgttgtgtaagcgctttaatatgattaaccgttagtgctctgcggccatttaagatgttgctgacgttcgatttagaaccaagttcgttggcaagatctgctgctttgagaccgtattgatccatgagcgttcgcaatactgaaacgccagggggcgttttctccaggtgttggttgagtgctttgaattccggcgcatgtttttcgtattcactgattcgggcacagagcaattcaaatagtgggttttcaagatcgtcgtggtcgaccagaaactccactagcgctagtgccctgcgatactcattgtcatttcggtcttcccccatcagtgggacggtttttaccgcatcgctgaaggtatcaacgatcttttttgcgctggttgcatccatctgacgatgagttctcattctttattaccccgatagtatgcggtcagtttgtcatattcggcatgggaaacgatatgtttcacaaatatcttatgtaacctgaaatctatgtaggaaatgagtctcaggctgttaccagaaacatcaatcacccaccatttatctctgtacttaaaattatccagtgaaggaatataccgcttcatctcttcaggctgagtgaatgtttttttctccagaacattcagcaactcagtgagagcaagctcatggtttggatacatgagcatcgcttcattgaacggttttcggctgataacatgcacaatgtagttccattacaaagttttcaacctgaaaacaatttagcgcaacgttatccagttttcaagttgaaaacaaaattgaattttaggtcattttgcctgttgatggacttacaacacgccaggccacatctcgcatggcgcttcgtgccgcctggctcacgcctccgagctggaaaaagccatggatgacaccgagatagcgctggcaagtacattccacaccctgttcctggaaccgttgatacagggcctcgccctcatcgcgcagtgggtcgaattcggcagtaatgatgtgcgtggatggcagtccggcgaagtcctcacgccagagcggactggcttcaggatgcagtggatcggttcgcggcatatacatctcgtagcctgaaagcagcgtgtcacgcgtgataatgtaatccagcccattacaggtgtagctcgcaaacctggcggttgcgtccagcatggggtagatcagaatcagctgtgcaggttgccattgacgggcggctttcaggcgtagcgcggtgaccagcgccagatgcccacccgcgctgtcaccagcaagcgtaatgttctcgcgatctatccccagtttctgggcatatttccagatagtattggctccggtttcggcatcgttatgtgcggccgggaaggtgtgatctggtgcaagtcggtactgtgccgcaatcacgcgacaacggctgtaaaaagctaactgccttaactggttatcgtgagtggcaaaaccgccgctgacaaagcagccaccatgataataaatgatgcagggtaatttccctgtggcattgagcggcgaaaccacgcgaaacgtcatggcatcgagttcaatatcttcaacctggacgcgggtttctgtttctcctgccagtgtcgtgctggcgatgtagcccgccctccggtcatcaatattctgttcgcgagaagaggggcggcccgcggcgataaacccagcgaccagttcggcaattcctttttccagtggcatataacgctcctttgactgtatgtatgtacagtttataacctggttcgttggggatggaaagtggtgaaacgaggggataatgattctggatagaggttcgcaaaaaatggaatgcggttggcgctgggtttttaatttttgtactgtgaaacgatgatgctatacgccattgacgtatagattattttcactactataagccaatggcgtatggaatatgcaatttatagaaacggaactctttactgaagatgttaaaaaactgctcgatgatgatgaataccataagcttcaggtttttatggctcagcatccagattgtggtgatgtcattcaggaaacgggcggcctgagaaaaatgcgctggggagcgcgaggcaaaggaaagcgtagtggcgtgcgaattatctattttcaccgtagtcaacggtatgagattcgcttgcttctgatttatcaaaaaggcattaaagatgatctcacgccgcaggaaaaagcggtgcttcgtatgctgaatgagaggtggtagatggataaagtgttatttgagcgattaactcaaagtatgtctcaaatgaatgaaatcattgaagggacccgtgaaccttctcgtacctttcatattgatgcaatgaagattaaagaaatacggcaggcatctgggttgtcgcaatctaagtttgcagagctgatttcggtcaacgtggatacgctgcgcaactgggagcaaggaagacgttcaccgacagggccagccaaagcgttacttcgcgccattgccaacgacccgagaaacgttatacaagcattgcgttattgagcaatgatccggctaacgtagattgctagccggtataccagagaacttattccccttcccccgggaacaggaacgggttgatggaactgcgggcgaagccctcctgttccatgcgcgcgtccagcaccagcgaggcgaggtcgtcggccactgcttctactttcgggtctttttcctgatagagaatcttcaggtaagtcccgcaatcgccgcagctttcggctttcaccgcagcctgctcattttccagcgaccagtagtgtaagtcgcggctctgttcgcagttactgcattttacgcgcacgacatgccattcggtttcgcacaggttacagtgcagataacgcagcccctgcgtggtgccgatctgcaccatgctggagaccggcatcgaaccgcacaccgggcaatactggcgcgcttcaccgtattccgcgcgggctttgcctggaatcaagctggccatttgcgcccagtaaagggagagcgcggcccagataaagggggctttatcgctgctgacggaggcaaaatccgaggcaaacagcgcgctggccatctgctccagctcctgctctgaggctttctccaggttctcgatcaccgccagcgcggggccgctcatctcgggttttagctcggcaattaacgaatgcagcagtttttgccagtgcttatcacgcggcagcacgtggatatccagcggcggcttgccctggtcgttcgcttctttaatacgtgcggtcagatccatctccagcggatggtcgtacagcaccacttcctgcgcgtgcgcgataagcgcggcaaagcgcaggtaatcgcccagcgggttattttcagccagctcgcgcagacgttcggcgcggcggttgtagacgtttttgagtcgggggaacaataacggcggaatcatatccgccgtacgtttctcgctcgaccccagctcatcttgcgggattatgcgaatactcattcagtttctttttccgttgtcttgcggacttctcggtaccagcgcgggtgatgtttcttcgcccacgaccgggttacccagccttccaccatcgcggtaatggtgcctttcacccaaagggcggcgtagatatgcaccatgataaccacaattaacgctactgcggcaaaagaatgcaacattaacgcgaatcggatcaccgggattgagaaagcaggcgcaaagtacggacgccagataattaccccgctcaccagcagcagcaccaggaagataatcgccgcccagaatacgcatttctgaccgaagttataacgcccggtgtcacccacttcctcgttgacgacgatcttacgaatattcttcgcccaaaagatatcatcccgattgattagattgtggtgccaataacggaaaaacatgatgatgaacgaggcaaacataaccacgcccacaaacgggtgcagaattcgcgccagttgcggggtgcccaggatatgcatcaaccagttgaaggatgggaataaaaagcccagcccgctcaccgccgccagcacgaagcagaaagcgacgatccagtggttgatgcgttccggcgccgtatagcgcacgatggtgtcacgtcgtttcatttgcgcacctcgtctttctcttcatgcaggttgtcatcttcctcttccgcgcggttcgggccgacgccgacatagtggaagacgctggcggcaaaggtcgcggcaaaaccgaacgcggcgagcggtttccagacgcctttccagaacttaacggtttcgctgatttccgggttttccggcagaccgtgatacagattcggcttgtcggcatgatgcagcacgtacatgacatgcgtaccgcctactcccgccggatcgtacagacccgcgttgtcataaccacgggtttttagttccgccacacgctcgcccgccagcgttttcatatcctctttcgagccaaaatgaatggcgccggttggacaggtcttcacgcaggccggttcttgcccgacggtcacgcggtcaacgcacagcgtacatttatagacgcggttgtcttccgggttgaggcgcggcacgttgaacgggcagccagcgatacagtagccgcagccgatacactgctcggactggaagtcgacaataccgttagcgtactgaatgatcgccccttccgccggacaggccttcaggcagcctggatcggcgcagtgcatacagccatccttacggatcagccactccagtttgtcgttctgttccacttccgagaagcgcatcaccgtccaggatttcgcggttaagtccgccgggttgtcatacaccccgacgttattgcccacttcatcacggatgtcgttccactcggagcacgccacctgacacgctttacagccgatacaggtggtgacgtcgatgagtttcgccacctcttcctggtggtcccgcgcctggggcgcgggggtgaaaccgttagtggcggaacgacgaatgatgtcttgcgattgataagccataggtcgtctccgttacaccttttccacgttcacaaggaaggatttaaactccggcgtttgcgtgttcgcatcaccgacgaaaggcgttaacgtattggcgataaagccttttttcgccacgccttcgtagccccagtgaataggaataccgatggtatcgatatccttgccgtccgctttcagcgtgcgaatacgcttggtcaccaccgctttggctttgatatagccgcggttcgaggagaccttcacggtatcgccatgcgcgataccgagcttattcgccagcttctcgccaatttccacaaactgttccggctgggcgatagcgttaagcaacgcgtgcttggtccagtagtggaagtgctcggtcagacggtaagtagttccgacatacgggaacttatccgctttacccagcgcgtcggcatcgtctttaaagatacgggcggcagggttagagataacgttcgggtgcagcgggttagtgcccagcggcgtttcaaacggctcgtagtgttccgggaacggcccttccgccatcttatcgatagcaaacaggcgacccatcccttccggctgcatgataaacggtccgacgtcgctgccgggcgcggcggcgctgtagtccggaatatcccatccggcccattttccgccttcccatttcagtagctgacgtttcgggtcccagggattaccctgcggatcggcggaggcgcggttatagaggatgcggcggttaagcggccatgcccatgcccagcccagcgtgttgccgagaccagacgggtcggcgttatcacgacgcgccatcatgttgccttccggcgtccagctaccggcgaaaatccagcagccgctggacgtcgtaccgtcatcgcgcagttgcgcgaacgaactgagttgttggcctttcttcaccaccaccgcgccggttgccggatcgataagatcggccagcgctttaccgttactttccatcgccacttcttcagaggcgggttcgtatggtttggtgtagttccaggtcatattcagcacctgttccgggttggcgccgccctgttcagagtacatcttacgcaggcgtaagaagataccggcgaggatttcgccgtcggtcatggcaattcccggggcgtccgcgcccttccagtgccactgtaaccaacgaccggagttaacgatggaaccattttcctcggcaaaacaggtggaaggcagacggaacacttcggtctggatttttgcgggatcaacgtcgttcgactcaccgtggttttgccagaaggtggacgtttcggtgttgagcggatcgatagtcaccaggtacttcagtttggaaagcgatgcgaccactttgtttttgttcgggaatgaggccaccgggttaaagccctggcagatatagccgttgaccttgccctgtttcatcatctcgaagtactgcagtacatcgtaccctttgtcccacttcggtagccagtcgaagccccagctattttccgctgtcgctttatcaccaaagaaggccttcatcatcgagacgaagaatttcggatagttgccccagtagttgacctgatccttcaacaatggcttcggcgtattggcagccagataggtttgcaggtcggtctgtttttcgctcggcagcgtcagatagcccggcagactttgcgacagcagtcctaagtcggtcagtccctgaatgttggagtgaccgcgcagggcgttaacgccgccgcccgccatccccatgttaccgagcagaagctggatcatcgccatagtacggatgttctgcgcaccgatggaatgctgcgtccagcccagcgcgtacaggaacgacgctgttttatcttttgcgctggtttctgcaatgtactcgcacactttcaggaagtccgctttcggcgtaccgcagatattttctaccatgtccggcgtgtagcgtgagacatgctgtttcaacagattccagacacagcgcgggtgttgcagtgtcgtatcgtgtttggcaaaaccgttttcgtccagctcatagtgccaactggttttatcgtactgacgcttgtcggcgtcatagccagtgaacagaccatcatcgaagccaaaatcttcacgcacgatcaggctggcattggtataggcctcggtgtattcacggttgtatttttcgttggtcagcagatacagcatcacgcctgacaagaaggcaatgtcagtaccagagcgtattggcgcatagaaatcggccaccgacgcggtacgcgtaaagcgcggatcgatcacaatcagcttcgcgccgttgtgaattttggcttccatcgcccagcggaacccgaccgggtgagcttctgcggcgttaccgcccatcaccacgacgaggttggcgttcttgatgtcgacccagtggttggtcatcgcaccgcgaccaaatgttggagcaagacttgctaccgttggtccgtgtcagacacgcgcctggttgtcgaccgcgagcatacccagcgcgcgggagaatttttgcgttaaataacccgtctcgttactggatgcggaagcgcacagcatcccggtggtgagccagcggttaacggtaacgccttcggcgttctgcgcctgatagttggcgtcgcgatcttccttcatcagtttagcgatgcggtcaaacgcttcttcccaactgatttgttgccacttatctgaacccggcgcgcggtattgcgggaatttcaggcggctttcagagtggataaagtccaccagaccggcccctttcgggcacagcgcgccacggcttaccggatgatccgggtccccttcgatatggaaaatagatgctttggcgtttttcgcaccgtcgccgaggctgtacatcaacagcccgcagccaacggaacagtaggtgcaggtgttacgggtttcgcgggtgcgcagcagtttatattgccgtgtttccgctagcgctacgccgggcgcgaagcccagtgccgccgccgtggtgcctgccataccgccagcgcagatcttaaagaactgccttctgctgacctgcatggtttgctccttgtttcgacattgtcacttctctttcacatttctctatccgaaacgctcagggagtggttgttatttttctttgcggacgggcccgcaaaggttcagaattggataaattttcctccatccgggaggagttgtaacagaataccataatgttggtgtgtgtgttcttatatggttaaaagaaagtgaacaatatactgtctgaagaagtcctaaatgtgactgatttcacaacctcacgccagttgactctctggaaacgcgaggatttgcagtccccccaacttgatgatgttgccgaggaagtgccagtggcactggtgtataacggcatttcgcatgtcgttatgatggcctctccgaaagatctgacgcattttgcaatggggttttctctgtcggaagggatcattgacagcccgcgtgaaatctatggcatggacgttgtaccgtcctgtaacggacttgaagtgcagattgatctttccagccgtcgatttatggggctgaaagcgcgtcgtcgcgcgctggccggacgtaccggttgcggcgtatgtggcgtggaacagctcaatgacatcggtaagccggtgcaaccgctgccgtttagccaaacgtttaatctcggtaaccttgatcgcgcgttaaaacatctgaatgattttcaaccgacgggtaagctgacgggttgtacgcacgctgcggcatgggtcatgccgtcgggtgaactggcggggggccatgaagatgtcggacgccacgttgcgctggataaactgctcggccgccgcgctacggaaggtgaggaatggcggcaaggcgcggcgctggtttccagtcgcgcgagttacgaaatggtgcagaagtccgcgatgtgcggcgttgaaattctgtttgccgtctctgccgcaacgacgctggcggtcgaggtggctgaacgctgcaatctgacgctggtggggttctgtaagccgggtcgggcgacgatttatacccatccgcagcggttaatcgcagactaaaatagtaccctctacatttgcgtaaaatatatattttctcaattttacagcctctcttgataacggaatcacgtatagtggcgaggccatacaggttttaatcgtttttatgctggaccgcagcttattccagccattcacgaggcgcttgctacccggtaatacttcgaacgaaaaaagcgcccctggggcgctcttttggcagtcgctaacgacttatttgctcagtttagcggttatatgcacgcgatttgcagcgtgaaaagcttagaactcacgctcaagatgatagccattataggtgtcgatgagttcgttataagctttaaccacagcctcataagaaccatctaccatatcgccgctgccgctattgaggtagtcctgctcatgcgaggtatacgccacgttatcgcgcacgcgccgaatgcgttttttcaccttgccctggaatttttccagctcagaaataaagccagggaagctacgatgtttatctatatcaacgttgatcttctcgtttagcttctgagtatgctcttcaaaatcagcgagctgtttgcttactgccgccacatcaaaagaatcatcagctacagcgtcattaagcgtctcggcttcctgcatcgtcaaaagcgtatagtacttaatggatttaccttctttcttctcggtcgccttaatttcattagccgcatgctgcccactcataatggtaatctcggcgatatatttcttcgcaatgggatcaaactcatcgaactgttttataaacgttttatggaacgctttagcgccagcaaaggcatcatccttgaagttatcttgatcatagtatttattcatactattgattgtttcagctagtggcccagccgcattaataaatgccagagcagcactatccagagaggcaaacgccggctttaattcagccgccgccttgatgtctttccggcagtcctggataaatgcaggatacacaggaaccagcggagagggatcgtcttccttaccggtagggccggtgcggaaatcgtcgaatgtgttagcataacgatttacagcacggtaaatatctgcctggagattattataacaatcaatgtaaacattcagcttttggttaagaacatcgttcgcatctgcgctttccgctgatgtgggttgtgtattgctcgctgatgagtccgcactctgagctacaggttgttcgtccgcttttttttcatcacaagcgcttagcccggcagtcatcagcatagcgataataattgatgataacaaatcctttttcattagaataacctataaataatatcattgaaatttacagattcattttaatgaaaaaaaacaggtatgtgatttattcaacacaaaaaatacttaatgcatatttcattataattaacattatcaatatcaatgtgttcgttaaaataagagaaccccaacgtaaatatacaaaaggcaattaaatgaaaaggaatttattatcctcagcgataatcattgcgctaatgaccctgggcgcaacaggatgtgatgacaataatgttaaaaccgaggcgacgccggccgccagcagtcagcctgcgacgccagcgccttctcagacgccggaaacgcaatctggcgaaagtccagcgcagccctcagcagcgaagccagaaacggcaactcagcccccggtggcgaaaccagaaacgccagctcagccggaggttgacgctgaagaagtttatagtgaaaaaatggatgtctatatcgattgttttaataaacttcaattgcccgttcagcacagtctggcgcgttacgcggattgggtgaaagactttaaaaaaggtccgacagggaaagagagcctggtttatggcatttatggtattacggagtcttacataacgaattgccagaaagagatgaaacaggtggccgccttaacgccattacttgagcctattgatggcgttgccgttagctatattgatagcgccgccgcgctgggtaataccattaacgaaatggaaaaatattatacccaggaaaactataaagatgatgcctttgctaaaggtaaggcgctgcatcagacattactgaagaatatcgaggattttaaacccgtctcggaaaaatatcatgaggctattcaggaaataaatgacaggcggcaattgacacagttgaagagaatagaagaagcggaaggcaaaacatttaactattattctctggctgtcatgatttcggcaaagcagatcaacaaggttatttctgccgatacctttgatgccgaagcgatgatgaaaaaagtcgcggaactggaaacaatgattgcgcaattgaaagaagtgaatactgatggccgtaattcttctttcatcagctctgcggctgattatcagctacaagctaaaaaatatattcgtcgcatcagagacaatgttgagtattctgattttgaaaagaaacgggtgcaggaccctgcaacaggatggatggttgcggattcttatccggcgtcgttgagaagttataacgagatggtggatgattataaccgcctgcgttgagtgacggcacattaactgcgcacaggctggcgcaagtgcctataaaattacgcgataacgccaataaaaagcgccgatcaggcgcttttttcgttcatgtattcttcatcaggcaatatccgtaaaaatagctgacgtaaacattaactaaagagagttattagaaaaaccagtaatctgaagctatcacaagatgttgacgtcacgctggaaggtactggtagtgtcattgaggatcggcatttatatggaaagcatttatccccctgatgcgaaaattctgagctacttcagcatagggcggcccagccttcatcacttatagggtgtcacgtccaactgttctgtaagacgttaattaatacctgccagccgcaacagtgctgtcactaccgcagcggcgataatcaccacaataagcggcattttacgccaggctaaaaatacggcgaagccaaccccaagaacgcgcgccattccggcaaaatgttcgccttcgtaaaaggtggtcgccagcgcgacggagaatagcagcaccgttgccgcatccgagagcagcgcctgtgaacgctcagacagcgccagacggctgccaagtttcgcgccgccgaggcgcatcaaataggttcccgcagacaaaagagcaataccgataataaatagcgtcatattgcccattattttttcctcgccagtaggccaagcagcgaaagcaacaccggcaatccggcagccacaaaaggaacggcggcaagcgacagcgcggcgccgctgcaaccacgaatcaatgtggtgcggtttttaaacgccgggatcaccagcgccagtaagattgccgggaatacggcatccagaccgatggtttctggggccggaagcagtttgccgacaccagcgccaatcagtgtgccaatcggccagaatagggcgacgcccagaccgcatagccagtaggcggctttacgttgttcgggtgttttttgcgacaggccgaacaccacgctctcatcattcataatatggcagccgaaaaagctggcggcgcgggtgccaaccaaatcgcgcaccgttacgccaaacggcacgtggcgcgcattcaccagcagtcctgccgccgccgccgctaacggattgccgccgctggcaacaatgccgataaacataaattcggacgcgcccgccagcacaaaaatagagaggacaaacggcacccacagtgggaaaccgtaggccatcgccagtgagccataggacatgccgacgacgcccacggccaggcacactaaaaatatcgcttttatcgtgtctcccttgagacaggaaaaatagtgtttcatcttctttagtcatatcgaacgaattttcattataatgaacggaacagatttgctttacaagacgaacatttcgttcgttatagtgaacgttggatgctttatgacacaacctattagcgtcattgccagaagtctggtacgcgaacgccagcgaaccggactgtcgctggcggagattgcgcggcgcgcaggcatcgctaaatctacgctttcacaactggaagcagggaacggcaaccccagcctggagacgttatggtcgctatgcgtcgcgctcgacattccctttgccaggctgctggagccgcaggtacaaaaaacgcaggtgattcgccgcggagaaggcaccaaagtggtggcggagcaggcgcattatcaggcgatattactggcggcgtgtccgcccggcgcgcggcgtgatatctatctgctgttgacgcagccgggggccgaccggatctctcatccgcatccgccggggtcggtggaacatattattgttacgcagggaaaagccctcgtcggcttaaccgaggcgccggaagagctggcggagggcgattacatttgttatcccggcgaccaggcgcatatctttaaagcgctggaaccggatactcaggctatcctggtagcggagcagaattgaaattgccggatggcggcgtaaccgccttatccggccgacaaaaaataaaaccgtaggcccggtaagcttgcgccatcgggcacacgacttactgcagatagaacacctcttttagctctgcgctgaccgggctgttatccggattcgcgggcataacgtcacgcatatgtttccaccaacgctggcaaacgtcggtgctggcaacggcgttccagcgctcctcggattcaatctcaacggtggcgaacagcagattgcgctcctgatcgagataaatcgcgtagtgatgcgcgccgtgagattttaatacggcttccagctccggccagattgggttatgacgacgctgatactcctcgtgcgcgtcggcatttacctgcatcacaaaggctttgcggatcataacgcctccaggtacagcccgcgaacttcatcgcggctggcggtgcgcgggttacacggcgcgcacgggtcggcgagggctttatccagccagccttcgatatcttcttttgtgacgcccagcttgctgaaaccttctggaatgccgacgcgtttgctcagcgtacggatagcgttaatcgcttcctgacttgcggcttcgtcagacataccgcgcgtctctacgcccatcgcctgtgcgatacgggcaaaacgcgcgacggcgttcggacggttaaagttctcgacaattggcagcaggatagcgttgcagacgccgtgcggcaggttgtgagttgcgcccggctggtgcgccagcgcgtgaaccagccccaaaccggcgctgttgaacgccatacccgccaggtactggccgaatgccatttgctcacgggcttcgaggttatggccatcgtcaaccgctttcggtagccacaaattgattaagcgaatcgcttccagcgcgttagcgtcggtaagcggatgcgcgccaacggagacataggcttccaccgcatgggtcagggcatccatgccggttgcggcggtcacagacgccgggatttccagcatgacgctggcgtcatccacggcaatatccgggatgatattcgggtcgatgatcacctctttgaccttacgggcagagtcgataatcaccgcgttgctggtcatctcggccgcggtacctgccgtagtattaatcgctaccagcggtacgccggcgtttttcactttgccgacgccggagtaggcggtggaagggccagggttggcggtgaggattttcaccgcttttgcggtatcgatcgggctgccgccgccgaaggcgataatgtagtcacattctgcgctctgatacgccgcaaaacctttctgcaccagctcttctgtcgggtttgggaacacctcatcaaacaggtggtaagacatttgatgttcatccagtgcgctaaacaggctatccagcaggcccagctttaccagttgaccatcggtaacgatcagcgctttgccccattgcttattcgccacgaggttcaccatatcggcaatcgctccagcgccatgcaggctaatttttggcagtgccaacataaagctcatcactattctccttaaaaaaattccctgttgcccgatggcgctacgcttatcgggcctacggtaaaatgcgcaccgtcctgtaggccggataaggcaaagccgcatccggcgttgagttgggaggtatcagtacagcgctacggcgctggccagcggtgtcacaccaaaacgtttgccgagtgcgaccagttcttcgcgcgtgatggtctgcttcataccgcccatcgaatagattttgactaatacctcagcggatttctctgcggtatctatcaaaccgaaggtttcatccagcgtaggtccgcttccgaacacgccgtggaacggccacagtaccagcgaatgtttctgcatttcttgcgcggtagcctggccgatttcatcggtgcctggcaccatccacggcagaatgccgacaccgtccgggaataccaccaggcattcggtgctgccttcccacagtttgcgggtgatcagcgcagtgttgttttccagtacgtaggtgagggcgatcaggttagtcgcatggcaatgcataatgacgcggtctttgccgtgggtggctttgatgcgttcgcagtgggagaggaaatgcgccgggagttcagaggtgggtaccgcgtcgtgggttaagccccacagaatgtggtagcctgcgccgtcactgtcgattttgaccacgcctaaattggctgccggatcgagctgcacgttgcggaagaatttgccggaaccggtaacgataaacggcgtattcgccagcagcggcatgggttgacttagcgcgatgtagcgcggtttttcgtggaaattagctgcaaacggtgcgatatcggcttcatccagacgcagcgtcaggttaccgccattacgttcgtcccaccctttcagccacgcatcagacgtggctttaatcatgccctggacgaaccaggaatcggtaatattttgcatgttcgtgttcccatttattgcccgaaggttattcgggtcttacgtaggccggataagcgcagcgccatccggcaatcgtgtttcatttattgccggatggcgacgcgggcgtcttatccggcctacagatcaggtgtcgctgtcagctacgtttgctcaggatctctttttcatagacgcgaacgctgtccagccactggctgccagccggcgtgtcgtgacgctggcaatacatttcccagacggcctgccacggcagagatttttgctcttccagcagcgccagacgcgcggtgtaatcgccgctggcctcaagctgacgcagttgatctgtgggttccagcagagcgcgcagcagcgcttttttcatgttgcgggtaccgataacccacgcggcgacacggttgatagaggcgtcgaagaaatccagaccgatatgcacacggtcgaacaggttatgacggacgatttcgctggcaattgcctgggtttcatcgtccaggagtaccacgtggtcgctatcccagcgtaccgggcggctgacgtgcagcagcagccgtggcacatagagcatggcggcggaaattttgtcggaaatcacttcagtgggatggaagtggcccgcatccaggcacagcgcggtctgacggctggtggcgtagcccatgtagaactcattggagccgacggtgtagctttccgcgccgatgccaaacagtttgctctcaacggcgtcgatgtggtgcgccgggtcgaatttctcgctaatgacctcatccagcgcttccagcaggcgctggcgcggggctaaacggtcgacggtaatgtctttcatgccgtccggaatccagatgttcatcaccgacggcgtaccgagctgctcaccaaagtatgccgagacgcggcggctggctttgcagtgatcgatccagaactggcgaattttcgcgtctggatgagagagggtaaaaccgtcagcgttcagtggatgagaaaaacaggtggggttgaaatccagccccagccggttcgctttcgcccactccacccagtttttaaaatgctccggtttgatctggtcgcgagcaaccggcgtatccgactcaaggtaaatggcgtgtaggttcagccgttttgggcctgggatcagacgcagcgcctgttccagatcggcgcgcagttcggtggcgttacgcgctttgcccggatagttgccggtcgattgaattccgcccgtcagcgaaccttccgggttctcgaatccggcaacatcgtcgccctgccagcagtgcatggaaaccggcaggcgatcgagctggcgcagcgcctcctcgacatcaatacctactgcggcgaaacgttgttttgccagttcccaggcttgttccagttgagtggtcatgcgcaaagctcctttgtctgtcgtttgggttgaaactgcgcaacgtggcgggcaatttcactatcaggattagggatataggttgtcaggtcgtagttagcgctgacgacctgacggaagtcatcgacgttgtttaattcgtcgagggtcataagctgaataccaatattgccaagggtggaggcttcaaccggcccggccatcacgcgaatgccacatgcatcggcgcacaactggttgagtagcgagttttggcatccgccgccgacaatatgcagttgggtaaatttttcgccgcgcagatttgcctgttcgtgcagaatgtcggcatacaacagcgccagactgtcgaaaatgcagcgcgccagttcggcatcgctgacgggaacgggctggtcggtctcgcgacaggctgcctggatttcagcgcgcatatcgtcaggattgataaagcgatcgtcattcgggttaatcaggaaacggcaggccggcagcgcttctgtttgggcgataagcgcaggcagatcggtaatgcgccgttctttcagcacacgctggagcagccacaaacccataatgtttttcagtacccgataacgcccttccgcgccgccttcgttggtgatattggcggccagcgcctcatcagtggtgtagggcattttgctttcaaaacccatcaatgaccaggtgcctgaagacaggtaagcgctatgtttatttgccagcggagaggcaataacggcgctggcggtatcgtggctggcgacggctaccaccggaatacggttgccctgcgggcaaatccagtcgccgataacattgccagggtgcgaggggcgaccgaaccagctctttttcgcgccagtccacgccagcagggtatcgtcccagtcatcggtattgatattgaccaactgggtggtcgtggcgttggtgtattcccagttcatttcaccggtcaggcggtagctgaaataatcgggcatcagcagcgcatgagcgacctgcgccgttaactcaggctgttgtttcgtcagcgcgcgtagctgatagatggtgttaaacggcagaaactgaatcccgctgcggcgatagatttcgcttttgccgatctggaccagcgcttgcggcatgatgcccgtggtacggttatcgcggtaggagaccggcaggccgacacgctgaccttgtttatccagcaggacataatcgacgccccaggtgtcgatgccgatgctgtcgataagaatgccttcattgcagactttcttcagaccaagacggatatccttttccagactgtcgatgtcccaggtgtcaaacccgtctgttttttgtaggcagttcacaaaacggtgaatttcacgtagcgtcagggtacggtgtttgctgtcgtaacgcgccagcatcacgcgcccgctggatgcgccgagatcaaccgcgacacaatggcgaaaagtcataatcaggtccttcttagagtcattgcgcacagtctaaaaaagccctcaaagacctaccttctcgttactgacaggaaaatgagccgctggcaacaaggcaaagatgaacgtgatagcgttcacagtttctactaataggccggtgtgatgtcgtccgcatttcccgctttttcccgccttttcttgaaaaaaagaccatgtttgcgcgctttagcgtcaaaaatttaaggtgaggccgataacccttaattactattcggacatgttgaattcaggaggaagcaaccatgaccgtactgcatagcgtggatttttttccatcaggtaaagcgcccgtggcgattgaacctcgtctgccgcaagccgctttccctgaacatcatcatgattttcatgaaatcgtgattgtggaacacggtacgggcattcatgtattcaacgggcagccgtataccatcagcggcggtaccgtgtgttttgttcgcgatcacgaccggcatttatatgaacataccgacaacctatgcctgacgaatgtactgtggcgttcaccggacgccttccagttcctggcggggttggatcaattgctgccgcaggagcaggatggttactatccttctcactggcgggtgaatcagagtgtgttgcagcaggtgcgccagttggtcggtctgatggagcgcgccggagacggcatggatgcgcctgccgtggcgaatcgcgaaattttgtttatgcaactactggtgttgttacgccgcagtagcctgatggaaggcgcgaccaataacgacgccaaactcaaccaactgatggcatggctggaagaccattttgcggaggaggtctgctgggaggcggtagctgaacagttttcgctgtcgctacgcacgctgcatcgtcagcttaaacagcataccgggctgacgccgcaacgttaccttaatcgcctgcgtttgatcaaagcccggcatttattgcgccatagcgatcatagcgtgacagaaatcgcgtaccgctgcggttttggcgacagtaaccacttttcgactctgtttcgccgagaatttaactggtcgccgcgggatatccgtcagggacgcgatgcgataatccagtaacgcgaacgctatcaacgttttcgtcgccaatatgctgataattataccctttaataccggatggcggctgcgccttacctggcctacggcggcgagcggtagacagaataagcgtagcgccatccggcaagcattcaacatgaggtgctgcggtggcaaatcagttaatccttttgaaaaaagatttttttactgatgagcagcaggccgttacggttgccgatcgctatccacaggatgtttttgcggaacatacgcatgagttttgtgaactggtgatggtctggcggggcaatggcctacacgttcttaatgagcgcccatacagaattacccgcggcgatctgttttacattcgtgctgaagacaaacactcctatacttccgttaacgatctggtgctgcaaaatattatttactgcccggagcgtttgaaactcaatgtaaactggcaggcgatgattcccggctttcagggagcgcagtggcatcctcactggcggctgggcagtatgggaatgaatcaggcgcggcaggtcattaaccagcttgaacatgagagtaatggacgcgatccgctggcgaatgagatggcggaattgctgtttggtcaactggtgatgacgttaaaacggcatcgctacgcgaccgacgatcttccggcaacctcccgagaaaccctgttggataaattaattaccgctttggctaatagccttgagtgtccctttgcgctggatgcgttttgccagcaggaacaatgcagcgaacgggtgctgcggcagcagtttcgcgcccaaaccgggatgacgattaatcaatatttacgccaggtccgtatttgccacgcgcagtatctgcttcagcatagcccgctgatgattagcgagatttcgatgcagtgcggttttgaagatagtaattatttttcagtggtgttcacgcgggaaaccgggatgacgccgagccaatggcgtcatctcagtaatcaaagcgattaactggccatgcctaaaccgacaatattcgccgcgataataattaccacgcagccgaggcttaatacagcaacgggacggcggccagcatttttccactcttttagcaccagaccgacaagccccccgcacagcacatagaagctcatgtgcagcatccagctcatgtagtcatattgcgctggaatgcgcgcgtgaccccaggcatagaaaaagaactgcaaataccacatcagaccgccaagcgcggacagcagaatattgctgataatcaacggtcttgccagcgagaagtcggcttttatcgacagattttgtacttttgccaggcggataaaacagaaaccgaggttcaccagcgcgccgccgcccataatcaccacgtaactcggcagcgcgacatagagcgggtcaacgccaagcgcggcagcagcttcatgcatcggtttcgcggcgttcatggcaaaagacattcccgccgagaaaataccgcacatcactgccagcagaagccctttcttcagattgaactcctccgctttaatgcccattttgcgttcttttaactgtccggcgcgcgtcacaatcccgacgccgatcagcgcgacaaaaacgccaagtagcgtcatgcgtcccccttcggtatgaattaacacatcgaagttaccgttgatgataggcgtcatcagcgtgccgacgataagcgtaatgccgatagcgatgccgatacccatcgacatgccgagataacgcatggtcaggccgtagttaatattgccgatgccccacatggcgccgaacagaaaaaccggtaaaagggtggagaggttaaactgcccataataggcccagaaatcaggcagtaacagagcgctaattgtccacggcagaataagccatgagacgatgccgcccactgaccacatggtttcccatgaccactgtttcacttgcttgaacggggcatagaagcaggctgcactggccgcccctatcaaatgccagaaaatacccatcgtaatcgcgttactcatgacatgttcctcattattttttatggacgggataccccttccgtttgcatgagtttaaaaattacgcagcctggtaaccttataacgattgccgccgttgggtgtattctggcaatcagcacgttaatgaagtgattaacttcacgttttaaaaaagtcggagcgcatcgtgaccgtctggatgttatttaaatcagtgggtaatatttgttttctaaaataccttcatcataacgacacgaaacgacttagctggcaacaatgcaaagaaaacgctgcgtgaggtcacataatgggaatagtctgacttaccgtttgataaaagggtagttatacagtaattatttggttgttttatttgtatttacaatttaaatatattgaaattaacgttaggaatcaattaaatataaatataaggaaatccctatattggcgttgttgatggtgttttgatttttattttatatgacgaatatgaatttcatttattttattttgctttttgaacattatcccaattttaaattaaagatctttgtctatattgtcgccattcacattgcgtattatggttgtaacggtctgacatgaaacaacgttttaattttaaattaaatggattctgttatgagaaaatctcttttcttactattacctcttgttgtaacaaatgcgcatgcagtatatgtcgatgttcgtcatgaatatcttgatgacagtaaagctaactatgaccgtgcgtatatttctcatcggtttgcgaatggtgttggttttgcgatagaagctatctcaaaatcaggcggggatgacaccaataaagcgtttaatgacctagaaacacagggcaacgaatatacgataagctaccaatttaaaaccggtgatgtcgcctggcaaccgggtttcgtgctggaaacaggcaacggttactctacctataagccttacttccgcgcgacgtggacattaaatgaaagctggtgggttggcgcgcgctatcgttttgaatatgtacgccgttcttctgatatccgtgatgatgataccatcaatcgtatggatgtctgggcgggttataaatggaacaactttgactggacaatcgaaggaatttataagaaagccgataaatatgatctttacgatggcggcaaagataactatgaatataacttcagaactgcctatattattgaccaatggtcgccattcgttgaggtaggtaatgtttccgtcaatagcaacagcgatgaaagacaaacccgtttccgcgtgggtataggctacacattctaatcattatccctgtttattatttattcccttttccggctactttataggtagccggttttttttacctggtgatgacctgcggataattattatcgcgcgttggccggataagacgcgaatcgccatccggcaacgagatgtgcaggaaactatgcgcttacatgatgcccagtagacggggtaagaacagtgtgatttccggaatgtaggtaattaataacagaacgccgataatcgcgccgtaaaaaggcagcaacggtttaatcacttcctcaactttgaccttaccgacgctcgccccgacatataaaccactgccaactggcggcgtaatggtgccaatcgccaggttatagatcatgataatgccgaaatgcaccggatcgacgcccagtttagccatgattggcagcagaatcggggtaaaaatcagaatggccggaccaatatccataaatgcgccgataatcaacaaaaagacggtaatgactaacaggataaccagtttattggcggaaataccgaggatcatatcgctcagcgccgcaggaatattggtgatcgacatcgagaaggacatcgccgaagaggttgccagcaggaacatgatgaccccggtcattaccactgtctggagcaaaatcgaaggcaaatccttaattttcagcgtgcggtaaaacaccatcgtcagcaataacgtatacaccacggcaatcgcggaggcttcaatggcggtgaaaatcccctgcacaatgccgccgacaataatcacgatcagcagcaggctgggaatggcctcaacggcaacttttagcgccatacctttttggacggtgaagaaaacccgataatttcgacgcttagcgaccaccagcgtgaccagcatacagccaacgccccacagcactcccgcgaccagaccgccggcgaacagagcggcaatcgatgttcccccgcttgccagcgcgtaaaggataaaagccgtggtgggcggaattaacattcccgtcggcgcggaggcgatattcaccgcggccgcaaagccgcgatcgtaaccttcgcgcgcgctcatcggcaccatcacgccgccgatggaggttgaggcggcaatcgccgatccggaaattgcaccgaacatcatattgccgacgatgttggtataagagagcgagccgggcagtttgccagtaaacagtttggcaaaattgaccagccgggcggcaattcccccgctattcatgatcaccccggacaaaacgaagaacggcacggccagcaaggcaaaactgtccaggctggagaacattttttgcgcggtggcgaacatcgaaatatcgaaaggcagtaccagcatcatggtgctgaaagaggcgataacgatgcagatcccgataggcgcgcccatggccagtaaaacaacaaagacggcaattagcgtacaggacgcaaaaatagggtcaatcatgtgatttctccagagtgtgctcagtggtatccgtggcggaatggatagctttcagggcgtcaacgatattcagcagcccatagaggatgatcagtacgcccgcgcaggggagcgcgtaataaatttttcccatcggaatgcccagcgcaggagagatttgcagcatagaaatcgcagaaatctttaagccgccgataatcaatacccaaatggaaaacgcgataaaaatgacctgcaggataatatcccaccagccgcgaatcgtcggcgacaccttatccagtaagagagtcaggctaatatgctgtttctgaccggcgacaaaagccatgcccagcattgatacccacaccaggagaaatcgcagcatctcttcggtaagggtgctgggaacgcccagaatgtagcggctcaccacctgccagcaggcgatgccaaccattatcgccagcaccaggcaacagatagcgcccagcaataaatcaagtccttttctgaatgtgttcatcttaatttcctgattagattaattttttgctgtctggatacgttgatacagcccgtaaagccgcggtttgtttttcagaccgtcgtaaataggctgtactgcctcctggaagggttttttgtcgatctcgtagaattcaacgttgaaatcttttaccgccgccagcctggttttctctatttccttgtcccatgcggctttctcaaattcgatcgacgccttgatggcggcttcgacgatgcgctgctgttccggcgtcagcttttccagcgtgagggtactcattagcaggatatcgggaatgcgggtgtgcatatcgtaggtgtaataacgggcgacttcgccgtggcgggcgatggtgagagcgaactcattgttttccgcgccgtcgagaatgccttgttgtaatgaggtatagacctccgcctggctcatggcgataggcgaagcgcccagcagtttgagggtttggatcgccgtctcactctgcatgacgcggatctttttcccgcgtaaatcctcaatgcgtttaatcggcgctttgctcatataaaaattacgcgcgccggaatcataccagcctacgccgataaacccctgcgcggcggtggactgataaacaggctccatcacctgcgggttatccattacgcggtagtattcctcgacggtggcaaacaggtagggaagtgagaacacgccgtactcaggcgaaaaactctccatcagcccggacgacactttagtgatgtcgacgacgccgacctgcgtcaactccaccagttcgcgctcgccgccaagctgtccgtccgggaagtactgtactttgatatcgccgcccgttttctcttccacttgctgccccaggaagtgcaacgcatcttttaccggctggctattttcagcgtaggccaggcgcaaaatggtttcgccgtgggagaagaaagagagtgtggagagtaaggccaacgtagccagacgtataaaaccaggttgcttcatgattccctcgcaattgtaataatttaccgggaatgtaattgcagtgtgaaattataaccttcttgattttgccaccgctgacaaaatttggcaccaaaagaaagattttgaaaccctgtttcacatttcatgatttccaggaattcatcaacaggcggtttcggttggaggcgtaaaaaacggtttttttcagcggatgccgtaacgtttataaccctggaaaaagtacggcattgataatcattttcaatatcatttaattaactataatgaaccaactgcttacgcggcgttaacactgtgccgctcgacaataatggagatgattatgagttatacactgccatccctgccgtacgcttatgatgcactggaaccgcacttcgataagcagacgatggagattcaccacaccaaacaccatcaaacctatgtcaacaacgctaacgcggcgctggaaaacctgcctgagtttgccagcctgccggttgaagaactgattactaaactggaccaggtgccagcggacaaaaaaactgtgctgcgtaacaacgcgggcggccatgctaaccacagcctgttctggaaagggctgaaaaaaggcaccactctgcagggcgatctgaaagcggctatcgagcgtgacttcggttccgttgacaacttcaaagctgaattcgaaaaagcagcagcaacccgtttcggctccggctgggcgtggctggtgctgaaaggcgacaaactggctgtggtttctaccgcaaaccaggattccccgctgatgggtgaagccatttccggcgcttccggcttcccgatcctgggcctggacgtgtgggaacacgcttactacctgaaattccagaaccgccgcccggactacatcaaagagttctggaacgtggtgaactgggacgaagcagcagcgcgtttcgccgctaaaaaataatttgcattgcacgtctgtagaagcgagtctgatgactcgctttttttgtatccgcgtaaggagcagcagatgcattatccggttgacgtgtttattggcaaaattcgtgactatgacggcagccgcccgagcgctatcgccaaggtgcaaatcgacggcgaactcatgctgaccgagctcggtctggcaggcgatcagcaggccgaaaagaaaatccacggcggccccgaccgcgcgctatgccattacccccgcgaacactatgctgattggattcgccagttccccgagcaggcgacgctgttttgcgccccggcgtttggcgagaatctgtcgacgaacggaatgaccgaacacaacgtgtttattggcgacatctaccgctggggcgaggtgttgatccaggtcactcagccgcgctctccatgctttaaacttaatttccactttgccatcagcgacatggccctccttatgcagaacagcggaaaaaccggctggctgtatcgggtcattgcgccaggtaaggtctccagcgatgcgccgttggaactggcgtcgcgtctgagcgatgtctcggttcatgaagcgggtgttatcgcctggtctatgccgtttgatgacgaacaatatcaccggctgttgagcgccgccgggctgtcggcgagctggagccgcaccatgcagaagcgtcgtttgagcggcaaaattgaagatagcgccagacgactgtggggggataaaactccgccaaaatgaaaggaaggattatgactgaagctgaaaatgcggtggcgatcgtaaaagaatttttggtggcctcgatgattcccgatgctgaacgcgccgcaacgtatatgcacccggaggtgaaaattaccttcaccggaggccgggcaatggctggcgcggcagatatcgcgcagtttaacggcgctcgctacaagtgggtgaagaaggcgctgggcgagtttgatgcggtgcagcatgatcattacgttgtgatttattccaacggtacgctgtatggggaatggcccgacggtcgcccgtttgccggtaatcgctttatcgatcgtttcgaagtgcgcgatggcaaaattacccggatggacgtgtggaacgacagcgccgagtggattctggtgccggaaatctcccggtaaatctcgacggcgagataaaaaatcggcctgcattcgcaggccgatggtttttaggttcgcttgtacagcggtagccacagcgtaagccgcaacccacccagcgggctatcgtcagccttcacccagccgcggtgctgctgcatggcgctttcgacaatcgccagccccagcccggtgccgccagactcgcggtcgcgcgcctcatcagtgcgatagaacggacggaagatctgctcgcggtcttcagggctgacgcccggcccgtcgtcatcgaccgtgatcgtaataccgtctttatccaccgagaagccgacttcaatcttcgtatgtgaatagcgcagcgcattacgaactatattttccagcgcgctttccagcgcgtttgggttgccatagagcggccacggccccggcggataatttaccgttaacgacttgcccatctgttcggcttcaaaggcggcgttatccagcacttcgccccatagctgattggctttcatcgtttcgctgaccagcgcatttttctgttggttacgcgacatcaccagcaggtcattgatcatgctgtccagacgctgcgcttcggtttcaatacgctccagctctttgctttcgccgccacgacgacgcagcagcgcggtacccagttgcaggcgcgtaaggggcgttcgcagctcatgggagatgtctgacagcaaacgctgctgcgaggtcatcatccgttccagcgccgtcaccatctggttaaaactggcgccagcggcgaggaactcctgcggacccgcctccagctccggatgctgacgcaggttgccttgcgccacttcatcagccgcgtttttcaacttacgcgccggtttcgccagactccatgccagccatagcaagagcggcgaactgaccagcatcgtgacaatgagcaacagaagcgggcggtcaaacagcagattaataaaatcggattgcgaactgctggccggtcgaatcaagtaaagctggtaattatcctctccgtcgcgaacggagaacggccccaccatctctacgcggccatattttttcttctgcggatgatcggcgttatccgcctgaccaatgaagttacgaatgatctgcatttcgctgcgttcagcgccgatcacgcgtccttcagaggtcaccagtaataaccgctgtccaggcggcgcccacttatcgatcgcgcggaacaggcgacgccaccacatcaggtcgttgggcggatcgttcgcaagttcagcttctacatgttgctctatcatcaatccctggcgctgttcgctgtccagcagctcggtcatctggcgtgaatcgagcttgggcaacatcaggaccagcattagcaccagcgccagcgtcaaccagaagatggcgaagatgcgcgcggttaaacttcctatcatgaagcggaaaccatcagatagccgcgaccacgcaatgttttaaaccacgggtgaccgtctttgcgttccggcagtttgcggcgcaggttagaaatatgcatatcaatggcgcgatcgaacggcgtcaggcgcttacccagcacttcctgacttaaatgttcacgggaaaccacctggccgaggtgttgcgccagcaaatagagcagggtgaattccgtaccggtcagctccagcgtttggccatcgaaactggcttcctggcgacccggattaaggcttagcgcatcgacttccagcgtcggcgagccgttgtcgctgctctgctgctgttcgctccagtgggaacggcgcaaaatagccctgatgcgcgctaccagctcgcggtcgttaaatggtttgggtaaatagtcgtccgcgcccagctcaaggccgagaacgcgatccagctcgctgccgcgcgcggtcagcataatgacaggcgtctggtgtgtctggcgaagcgctttcaacgtatcgataccgtttttcttcggcatcatgacgtcaagcaaaagtaaatcgatgctgtcatccaaaagctcaagcgcctgctcgccgtcgtgggccaccaggacattaaaaccttccatttcgaggagctcttttaacagggaagtcagctctcggtcatcatcaactaacaggattttattcattgtttacgtacctccgaggcagaaattacgtcatcaggcgtcgctaatccatgactttacgttgttttacaccccctgacgcatgtttgcagcccgaatcgtaaactgtctctcgttgaatcgcgacagaaaagattttgggagcaagcgatgcgcaaagttaccgctgctgttatggcctcaacgctggcattcagttttttaagccacgcagctgaagttgttacaagcgataactggcaccccggtgacggggccacgcagcgtagcgcgcaaaatcatatgtttgacggcataagtttaaccgaacatcagcgtcagcagatgcgagatcttatgcaacaggcaaggcacgaacagcctcctgttaatgttagcgaaatggagacaatgcatcggcttgtcaccgcagaaaaatttgatgaaagcgctgtgcgcgctcaggcagaaaaaatggcgcaagagcaggttgcccgccaggtcgaaatggcccgcgtgcgtaaccagatgtatcgcctgttaacgccggagcagcaagcggttttgaatgaaaagcatcagcaacgaatggagcaactgcgcgacgtggcgcaatggcaaaaaagttcatcgttgaaattattgagtagtagcaactcacgttcccagtaacaaccctgttttccttgccatagacaccatccctgtcttcccccacatgatgtgggggttttttttatctccagtttgtcattctgttattagcttactgttttaaaccatccgttatactaccggcagaagatagcgggagtatttatgaatcaaacctatggacggctggttagccgggcggctatcgcggcaacggcgatggcatcagcgttacttttgatcaaaatttttgcgtggtggtatacgggatcggtgagtattctggcggcgttggtggactcgctggtggatattgtcgcgtcattgacgaatttgttggtcgtgcgttattcgctgcaacccgcagatgatgaacacacgtttgggcacggtaaagcggagtcgctggcggcgctggcgcaaagtatgtttatttccggttcggcgttgtttctgtttttgaccagtattcagaatctgattaagccgacgccaatgaacgaccccggcgtggggattggcgttaccgtcatcgctctgatatgcactattatactggtcacgtttcagcgctgggtggtacgcaagacccaaagtcaggcggtacgggcggatatgcttcattatcagtctgatgttatgatgaacggagcgattcttatcgcgctggggttatcctggtacggttggcatcgtgcggatgccctgtttgcgttaggtatcggcatctatattttgtatagcgcgttacgtatggggtatgaggcggtgcagtcattattggatcgcgcgctgcccgatgcggaacgacaggaaattattgatatcgtgacgtcatggccgggagtcagcggcgcgcacgatctccgcacgcggcagtcagggccgactcgctttattcagattcatttggaaatggaagataatctgccgctcgttcaggcgcattttgtggctgaccaggtagagcaggcgattttacagcgttttccgggttcagatgtcattattcatcaggatccctgttcagtcgttcccagggaaggcaggaagttcgagcttgtataattgattgttaaaaagtgagccaggccagcattttgtgtataaattaccgccatttggcctgacctgaatcaattcagcaggaagggattgttatactatctgtatattcgttggatcgtttcgaagtgcgaaatcggcttccggcaatagatttcattttgcattccaaagttcagaggtagtcatgattaagaaaatcggtgtgttgacaagcggcggtgatgcgccgggcatgaacgcggcaatccgcggtgttgtgcgcgcagcgttgacggaagggctggaagtcatgggcatttatgacggctatctgggcctgtatgaagatcgtatggttcagcttgaccgttacagcgtatctgacatgatcaaccgtggcggtactttcctcggttctgcccgtttcccggaattccgtgacgaaaatattcgcgctgtcgcgatcgaaaacctgaaaaaacgcggtatcgatgcgctggtagttattggcggcgacggttcttatatgggtgcaaaacgtctgactgaaatgggcttcccgtgcatcggtctgccaggcactatcgataacgacatcaaaggcaccgactacactatcggctacttcactgctctcggcactgtagtggaagcgattgaccgtctgcgtgacacctcctcttctcaccagcgtatctctatcgttgaggtgatgggccgttattgcggcgacctgacgttggcggcggctattgctggcggctgtgagtttatcgtggtgccggaagttgaatttaatcgcgaggatctggtggcggaaatcaaagccgggatcgcgaaagggaaaaaacacgctatcgtcgctatcaccgaacatatgtgtgatgttgacgagctggcgcactttattgaaaaagaaacgggccgtgaaacgcgtgcgacggtgctcggccacattcagcgcggtggttccccggtaccttacgatcgcattctggcttcccgtatgggcgcgtatgctattgacctgctgctggagggccatggcggtcgttgtgtcggtatccagaacgagcagcttgttcatcatgacatcatcgatgcgattgaaaacatgaagcgtccgttcaaaagcgactggatggagtgcgcgaaaaaactgtactgattgtttttgcgcgcctgatggcgctacgcttatcaggcctacaggttgcagaaacgtgtaggccggattaggcgttagccgccatccggcaatccctcagatttattcctcgaagttatagccaatctttttttattctttaatgtttggatctctttctggcacgctttgctcatcacaacacaacataagcgagtctggcgatgaaaaagtggggcgtgggattcacattattgctggcgtcaaccagcattctggcaaaggatattcagttacttaacgtatcgtacgatccaacgcgtgagctgtacgagcagtacaacaaagcgtttagcgcgcactggaagcaggaaaccggcgacaacgtcgtgatccgccaatcgcacggcggttcgggtaaacaggcgacttccgttattaacggcattgaagccgatgtcgtgacgctggcgctggcttacgatgtggacgctattgcggaacgtggtcgtatcgataaaaactggattaagcgtctgccggataactcagcaccttacacctccaccatcgttttcctggtccgtaaaggcaatccaaaacaaattcatgactggaacgatctgattaaacccggtgtgtcggtgattacgccaaacccgaaaagctctggcggcgcacgctggaactatctggcggcatggggctacgccctgcaccacaacaataacgatcaggccaaagcgcaggactttgtcaaagccctgtttaaaaacgttgaagtgctggactccggcgcgcgcggctcaaccaatactttcgttgaacgcggtatcggtgatgtgctgattgcctgggaaaacgaagcgctactggcgacgaatgaactgggtaaagataaattcgagatagtgaccccgagtgaatctattctcgcagagccgaccgtttccgtggtcgacaaagtggtggaaaagaaagacaccaaagcggtagcggaagcctacctgaagtatctctactcgccggaagggcaggagatagcagcgaaaaacttctaccgtccgcgcgatgctgacgtggcgaaaaaatacgacgatgcgtttccgaagctgaagctgttcaccattgacgaggtgtttggcggctgggcgaaggcgcaaaaagatcacttcgctaatggcggtacgttcgaccaaatcagcaaacgctaaaccgtttataaacccggtaacgtattatgttaccgggttttttctttgccacaattttgcgttactcttccccgtctatgggtcacagggaacgcatatcatgaaaaaaacaggctactttttactggcggtgatagtgattgtcgccgcggcgggcgtcggttactggaaattttccggcaaccctgatgcattacgggaaatcgtgcttgaacaatgcctgcccgatcagttacagcatcaaaacccagcgccgtgcgcggaagtcaaacctcgcgctggctatgtcgtctttaaagatcgtcacggtccgttgcaatatttattgatgcccacctaccgtatcaacggtacagaaagcccgctattgctggaacccgctacgcccaactttttctggctggcttggcaggctcgcggctatatgagtaaaaaatacgggcatgatattccggatagcgcggtctcgctggcgattaattcgcggcttggtcgttcacaggaccatttgcatatccatatttcttgcatccgtcctgacgttcgggaacaactggataacgatctcacgcgcatcagcactcgctggcttccgctgccgggtggcctgatggggcatgaatacctggcgcgccgggtaaccgagagcgaactggcgcagcgtagtccgtttatgatgctggcggaagaggtgccggaagcgcgcgatcatatgggacgctatgcgctggcggtggtacgccaaagcgacgactcttttgttctgctggcgaccgagcgtaatttactgaccttcaatcgcgcatcggcggaagagattcaggatcatagttgcgccattttgtcttcccgctgattttcgttacaccccctgttcattatcttattgattcttatcccggtttaaaaccggggtaagatcgtgtctataaaaatatgtgaaatcgatcaaaagatataaaggtatacctttatatcttttgatggttagttacactctcttcatagcctccatagattgtctggtggatggcttatataaaaacgtttttatttcatgtagtgacatcattaattgttcaccagatttgcgctgttaagcgtaaaggaatatcaacatgaaactttctatcgtggaaaaaatcggcttcggcgcgggagatatggcgataaacgttgtgattatcgccatgcagctgctcctcgcctatttctataccgatatctacggcctgagcgccgctgatgttggcgtactgtttgtggttgtgcggatgattgatgccattatcgatccggccatgggggttctgaccgataaactgaatacgcgctggggacgttaccgcccgtggctgctgtggtttgccattccttttggtttcgccgtgtatttgatgtttattacgcctgacatggcttatatggccaagctggcgtgggcctatggcacctatattcttatgaccctggtctataccgcgatcaccattccctatatttcgatgattggcgtgattaccagcgaccccgtcgaacggttaagcgccaacggttatcgctttgtgatgaccaagattgccgcttttctggtgactatcgtcgtaccgatgcttgccgtctggctggggcagggcaacaaggcgctgggttaccagttttcgatggggctgatgggggcgatgggcgccttgctgtttatcttctgttttcttaccacgcgtgaacgcagcgagccggaaattacgtcgttatcggtggggaaacagtttaaatatctgttacgcaacgatcagtggattattctcggcgttgttattctgctgctgatgtgcggttatgttattcgcggttccgttgccgcttattacgctaagtattatctgaacggcggcgatagcctgatttcacccttcctgactaccggcgtcgttgcctctattttagcgatgatcgctaccacctggataaccaagttctgggacaaaattaagatgttccgctacacccagattattacctttatcctgagcgcgctgatgtatttctccgtcgggcgtgaaaaccttgtcctggcgtttgccttctattttcttattaatttcttctgcgatatgcaaatgccggtgttctggtcctctatcgccgaagcggtggattacggagaaaagaaaaccggtctgcgcgtttccgggttggcgtttggcggcatcctcttcttccagaagtttgggatggggatcgcgggcgggatactcggattcctgctgagccactttggctatcaggccgatgttgaacagagcgcgcgttcgctcaccggtattgcgctgatgatgacgctcattccggctctgtttcaccttgcggttgggctgcttatgaaaaagtatctgattaataatgaatattatcgagatattcagcttgccctggcgcagaaacaggcataaggaggcgcaaatgaaggccatgaataaggtttgggttatcggcgatgcctccgttgatctggtgccggaaaaacagaacagctatctgaaatgccccggcggagcgtcggcgaacgtgggggtatgcgttgccaggctgggcggagagtgcggttttattggctgtcttggtgacgatgacgccggccgcttcctgcgccaggtttttcaggataacggcgtggatgtcacgtttctaaggctggatgcggacctgaccagcgcggtgctgatcgtcaacctgacggctgatggggagcgcagctttacctatctggtgcatccgggggctgatacctacgtttcgccgcaggacctgccgccgttcaggcagtacgaatggttttacttcagctcaattggcctcaccgacaggcccgctcgcgaggcgtgccttgagggagcgagacgcatgcgagaagccggtggctacgtgttattcgacgtcaacttacgcagcaaaatgtgggggaatactgatgaaatccctgaactgatcgcccggtccgccgcactggcttctatctgcaaagtctcggcagatgagctgtgccagctcagcggggccagtcactggcaggatgcgcgttattacctgcgcgatcttgggtgtgacaccacgatcatttcgctgggggccgatggcgcgctgttgattaccgccgagggggagttccattttcccgcaccacgcgtcgatgttgtcgataccacgggagccggtgatgcttttgtcggcggactgttgttcaccctttcccgcgcaaattgctgggatcatgccctgctggcggaagccatcagcaatgccaatgcctgcggcgctatggcggtgacggcaaaaggcgcaatgaccgctttaccgtttcctgaccaactcaacacttttctttccagccattcgctggcacaagccatgaccgtgaaataaggagtcatcatgcacgttgatcgaaacaaaatactgggatgcctggtgggcgccgccgccgcggacgcgatgggagccgcgacggaagtacgcacccagcagcaaataaaagactattttggcggctgggtgacgacctttcaaaaaccgccagcggacacgtttggccgctgcaacgaagcggggatgtgcacggatgattttattcaggcgaagtacatcatggatgcgctgctgcgccatcaacgccaggtcagcgacgaggcgatgcgcgaggctttccagcagtggctggattacccgtactacgccaactttaccggcccgacgacgcgtgcggcaatgaaggcaatattcaatgataaccgcgcctctttacagggtgagctggaaggcgagaaacagtcggtacagattattaataagggtaacgcggaggcaacgaacggcgccgccatgaagatttggccagcggcggtgctgcacccgggtgatattgacgcggcgattgaatgcgcgctacagatttgccgctttacccataataacgtgctggcgatgtccggcgcagcggcgatggcggcggcaaccagcgaggcgttaagagcgcagaccaatgcagacagcattattgccgccggtatttacggtgcgcaaaggggctatctgctggcgcaggagcaaggggcgatgatggtcgccgggccttccgttgcccgacgcattgagctggccgtagatatcggtaaacgtcatcgccattgggaaacggcggtggtggaacttgctgatattattggctccgggctgcacgtgagtgaagcggtgccggcggcctttggcctgttcgcgtgttgtccgaattctgccgtagatgctattatctccggcgttaatatcggcaatgatactgatactgtcgccaccatggtcggggcgatttccggcgcattccatggcgtggaggcttttcccgccgattatttaacgactttggatcgtatgaatcatttcgatttggcagaactggccaggcaaatcgcagggtagcgacttcaccctgccggggacggtaaaacgtcccctgctggcgaagacgtgaggtgcgcagcttgcaggttgataaaacgagctttactccgctttataagcaactattttttatcatctgtcagcagatccagaacgggtctttgcctttgggtagccaactaccgacgcaaaaagagattgccagatcctacaacgtctcgctgattgtggttaaacaggcctggagcgaattaatcaatgcgggcattatttcctcccagcgcggaagtggttcggtggtgtgctcggtgccggaaggcgtgagctacgggcacacgtttcgcggtattacccgcgatctccaggacgccagcgtggcgattgagaaccgtattctggaaatcgcgccgcgccgcgcgcgcgacgctcaggcagacggcttgagcctgcccgcacagcatcactatctctatatttcgcgtattcgttgcctgaataaccgcccatttaaccatgagaaaatatatctcgatctcagcttctttcccggcctggaactcacaccgcaggcgctggagcatacgtcgctttattcgttattaaacgtcacaagcgactcggcgatagaaaaagttgaggcgattttaccttccgctgacctgtgcgaaaaattgcaaatcgccgccaataaaccgctgttatccgtcgccagacagacgtttcaggccgggaaggacagcccttttgagtattgccgctattacgtgctgtctgaatactttggtgaaattcattatcactgatctgtccacttaatcctgcgataaccccaccatatctggcgtttacctgcctgactgtccgtcgtattcttgctgaaaaaatcgtcaggagacaggtatgtcgctctggttgtcccatcctctgttcctcccgtccatcatcgttggcgttactatccttctgtgggcgacttcgccactgccggagtttatgaccgcactgctattttttgctgtggcgatgggaccagggaaagttcctgcgcgggcggggatgctgtgatgtatcgcgctggcggtgatacgccaaagcgatggctcttttgtcctgctggcgaccgagcgtaatttactgatcttcaatcgcgcttctgccgaggaaattcaggatcatcagtgtgatatcttgaaccaacaggtcatcaaatgacagcttgatattgcattaacgaataccgtttggaggccggacaaggctctcgtggcgctatccggcaaaatctggcgatggcgcgggcgttaccaggccggtggatctgcggggtggctgtcattttccagatgcggcgatttaataaacacgcctttccagggtttatcgccgttattaatgagataatgcgcctccccaggttcgcactgtaaaacatctccagtttgcaggatatgaggtgttccttccagatacaggcacacttcaccgcttagggtataaaaaatctcacaagcggtattatggcgatggttagggaatgactgccctggttgtagtatgacgacgcccatatcgcagcccggcccacggattaagtatttagggccattatcgccaaagcggtattcatgattcttctcattcgttttttgcatgcttattctcctgttacaggcctggcgctttccagagggatgtcgttaagccaccatcgaccagcgcgcgttgatcctgataaacggcctgccatttttctctggcctgctgatagacagcgaaattttcaggattaggtttatgctcccgatcccagcgcactagcttttctcccgtttccgccagcgatggccagacacccacgccaacgcctgcggcaatagcgcaccctagcgcggtagcttctttgacgacaggtacgtgaacggtgagtcccgtaacgtcggcaaggatttggctccataatttgcctttagatcctccgccagcaaaaaccagcgagtcggcctgtacgccggaaaacgcggcaatttgctgtaaattgcaggcggaaacaatggcggcattctcttccagcgcgcgaaatagggtcgctttattacacttttcaggatcgatagacagattgataaacgacggcgcggcatggtaccagcgtttaaaacgcataacgtcagagaagatgggcatcacaccgtacgcgccgggaggcacccggctggccatatcttccagcagggaatacgcatcaatacctaacctttcagcgattagtttttcctcggcgcaaaaggcgtcgcggaaccaacgcatcgttaacccagtaaaaaagctaatagactcggtttgtaccataccggggatcacatgaggattgatgcgaacgttcatgtttgggtcggtgaccggcgcgggaagattgacgacctgttgccagaaggttccgcccagcacggccgtttgcgccgggcgtacgacgcccagccccagacagcctaactgcacatcgccgccgccaacgatgaccggcgtacccgcttgcaggtcgcactgttcagccgctttctgtgaaatgtgaccgagcagcgtcccggtttcttttaccggcgagagaatgtcagaacgcaggcccgccatctgtaacagactacgtttccagttgcgggtcaccagatccaataaccccgtcgtgcctgcgttggagggatcgaccgccagttcgccgctgagcataaaggccatccagtcgctgatcatagtgacggttgacgcgcgatgataaatatccggacgatggtgggcaagccagagcagacgcggaatagcgctgagcgccagcgtttgcccggagcaacgataaacttcctcctcaaaggtgttatcgtgcagctcttttaattcactgacttcgtgcgccgcgcgggcgtcaacattagcgcaggcccaaattggttcgccgttactgtcataaataacaatgccttcacgcatcgagcaggccgatacggcagcgatagccgttgcagggatggcggctttctgtagtgcctgacggatacactggcaagccagttgccagtttttggcaagatcaaactccatcgaaccaggcacatccggcacggccagatgctgccattccgcttgaccgacagctatttgctttccttgtagatcaaaaattactgctctgacgctaccggtaccggcgtcaagagccatcaggtaatgtcctgattcagtatgggtacagagtcgagccatttttttatcctcggctatttttacatcgttacataaaatcctgtcagttattgtttattgaattgaggtaagtgttattttattttttttatttttcaataatttgaattattttccctgcggttttctgatcggtaaccagtgcattgatatagttaccgcgcatagcggcaataatagcttctgctttttgttcgccgccggcgacgccaatcacggttgggatcgtggaaagtgaatttaacttcaggccaattaattcgttatggattttgatgtctggaataatttcgccatgagcatcaaaaaaatagcccagaatatcgcctactgcgcctttgcggccaatcatgagttgttcaccctgagtgatataaccggattttaagatactggcttgatctttctggttaattgccccaatccccacgatggcggcatcggcagcttgcgctgtgagcatcacatcccgcacgctattttcattgcgcagcgtgcaggcaatttcctgcgatgatgcgcgcagcggcgcgggcataatacttacgctacaagcggcatcaagctggcctattccggtcatatacggccccacgccgccggataacgtgaccagtcggatttgttgcgccgagataaatccgctgaggcgttttaatgtggtcatcgtggcttcgccaaagccgacggccagcagttgctgtggccgcagtgactccatcaacatatgggcggcgccgattcctaagcgcagaccaatatcggcatcgggtaatgccggcagcacgcggatattctgcaatgcgaagtggttgcgcaaggcattttcatactcaagacacccttcgaagcgggagttgatttgtacgcgaataataccggactgatgccctttctccagcagacgagaaacctttagccgggttagccccagacgctcgctgatttcactctgcgtcaatccatcgtgatagtagaaccaggcaatacgcgccacctgctcttcttcgcacattccataatcagataccaacgtattatcgctcattgtcataacctggctttactttgaacatttctaaatcattaacacaattgttcagttatcactccgaaataaccgtgattaacgccacaaaaacgcgccaaatctgaacatttatcatctaaaaattcatttattcagaaaacgtgatctggatgagagttttttgaccaaataactactaccgttttgaacaatttctttttcaaaaaacatttgttcagtcccgtcagtcaacattgagggagcggaggcaacatgcaaatcagtcacaatactgcatcccctctgatttgtgtgcagaacatttataaaagttattccggcgtcgaagtactaaagggaattgactttactctgcatgcgggagaggtgcacgcattgcttggcggcaatggtgcgggtaaatcaacattaatgaagattattgccggtatagtcccgccagatggagggactatcgatattgctggtgtgcgttgcagtcatttaacgcctctgaaggcgcaccagtatggcatttacctggttccccaggagcctctgttatttccgagtttatctgtgcgggaaaatatcttgtttggcttgcagggacgtcaggcctccacggaaaaaatgcagcagctattaaaggcgatgggatgccaactcgatccggcgagcgctgcgggtacgcttgatgttgcagaccgccagatcgttgaaattatgcgcggcttgatgcgcgactcgcgaatcttaattcttgatgagcccacggcgtcgttaacgccagccgaaactgatcggttatttacgcgtctgcaagagttgctgaaaaagggtgtcggaattgtatttatttctcataagctaccagaaattagacagttagctcactgcgttagcgtgatgcgtgacggtaaaatcgcattattcggaaaaacgcatgacctttctaccgacgagattattcaagctatcaccccggcaacgcagggcgtcagtctttccgcgaatcaaaagttgtggctggaattgcctggcagccgcccgcagaacgaacgcggcgcgacagtattagcgctggagtcactgacgggcgaaggttttatgaatatcaaccttgaggtgcgggcaggcgaaatccttggtctggccgggttggtcggcgcgggacgcacagaactggctgaaacgctgtacggtattagaccggtcaatgcggggcggatgctgttcaatggtcaagaaattaacgccctgacaacccaacagcggttgcagctcggcctggtctatttgccggaagatcggcagtcatccgggctgtatcttgacgcttccctggcatggaatgtctgttcgctgacccacaaccaaaaaggattttggataaagccccagcgggataacgccacccttgaacgttaccaccgcgcgttaaatatcaaactcaataatgccgaacaggcggcgcgtactttatccggcggtaaccagcaaaaagtattgattgccaaatgcctggaggcctctccgcaattactgattgtcgatgaaccgacccgcggtgtcgatgtctccgcccgcagcgatatttatcagctgttgcgcagtatcgcgcaacaaaatgtcgcggtgctatttatttcctccgatctggaagagatagagcagatggccgatcgcgtatatgtcatgcaccagggggaactgggggggcctgcgttatgcggcgaggaaattaacgttgataccatcatgcacgttgcgtttggcgaacatggtgcgtcggaggcaacatgttgaaattcatccaaaataaccgggaagcgacggcactgctggcaatagtctgtttattcgtgtttcctggcgcgctggatagtcagtatttgagcgtgcaaacgctgacaatggttttcagtagcgcgcaaattttgatgctgttggcgattggcgcgacgatggtaatgctcacccgcaatattgatgtatcggtgggctcgacgacaggaatgtgcgcggtattgctgggagtgatgttaaacgccggctatagcctgccggtcgcctgcctggccacactaatattaggaattgtcgccggattttttaatggcgtactggttgcctggttgaagatacccgccattgtcgccactctgggaacgctgggcttgtatcgtgggatcatgctgctatggacaggggggaaatggattgaaggattacccgcaggcttaaagcaactctctgctccggtgtttctgggaatttccgcaatcggctggtttaccctggtgttagcgctgcttatggcctggctcctggcgaaaaccgcctttggccgcaatttttacgccaccggcgataacctgcagggcgcccggcaattgggtgtccgtaccgagatggtacgcatcatggcattttcacttaatggcggtatggcggcattggctggaatcgtgtttgcctcgcagattggcttcattcccaatcaaaccggcacggggctggaaatgaaagccatcgcggcctgcgtattggggggaattagcctgttaggcgggtcaggcacggtcatcggcgctattctcggcgcttattttcttacgcaaatcgatagtgtgttagtgctgctgcgtatccccgcctggtggaacgattttattgctggcctggtattgttgggcgtactggtattcgatgggcggctgcgttgcgcattacaacgcaatctgcgccgccagaaatatgcccgttttatatcaccacccactccactacagacggaagcaaaaacgcacgcacaacagaataaaaacaaagaggtggcatgatgaatccatggcgacgctatagctgggaaattgcgctggcagccttattgatctttgaaattctggctttcggtctgattaatccacgtttattagatattaatgtcttactttttagcactagcgattttatttgtatcggtattgtcgctttgccgctaacaatggttattgtcagcggtggtatggatatttcatttggttctacaatcgggctatgcgcgattaccctgggtgtgctgtttcagctcggtatgccgctacctttagcgattattattaccctactacttggcgcaatatgtgggctgataaatgccggacttattatttataccggcgtaaacccgttggtgattaccctgggaaccatgtatttatttggtggtagcgcattattgttatctggtatggctggcgccacgggttatgaaggtattggtggatttcccacagcgttcactgactttgccaatatttcatttcttggtattcccatgccgcttattttttttcttgtgtgctgtctgtttttctggctgctcatgcatcgtacgcatatgggacgcaacgttttcctgattggccagagcgcccgtgtcgcgcagtacagcgcgatcccggtgaatcgcacgttgtataccgtgtatgccatgaccggatgcgcctccgcgatcgccgccgtattactggtttcttactttggctccgcacgttcggatctgggcgcctctttcctgatgccggccattacggcggttgtgctgggaggcgccaatatttatggcggctccgggtcgattatggggtccgcgttggcggcgctgctggtgggatttttacagcaggggctacagatggccggagtgccgaatcaaatttccagcgcattgtccggtgcgcttctcattgttgttgtcgttggtcgttccgtcagtttgcatcgtcaccaaatccttgaatggtactcacgccgtcgcaatgcgcatcaggcatgatttccttttgaaatttatggagaaaaaaatggcaagacacagcattaaaatgatcgccttactcactgcgtttggtctggcatctgcggcaatgaccgtgcaggcggcagagcggattgcttttattcccaaactggttggcgtgggcttttttaccagcggcggcaatggcgcgcaggaagcgggaaaagcgctgggcattgacgtaacttacgatggccctacagagcccagcgtctcaggccaggttcaactggtgaataactttgtcaatcaggggtatgacgccattatcgtttctgccgtttcgcctgatggcctgtgcccggcgttgaagcgggcaatgcaaagaggcgtgaaaatattaacctgggattccgataccaagccggagtgccgttcttactatatcaatcaagggacgccaaaacagctcggcagcatgctggtagagatggccgctcatcaggtggacaaagagaaagcgaaagtcgctttcttctattccagcccaacggtgaccgaccagaaccagtgggtgaaagaagctaaagccaaaattagccaggaacatccggggtgggagatagtcactacccagtttggctataacgatgccacgaaatcgctccagacggcggaaggtatcatcaaagcgtatcccgatctggatgccatcatcgcgcctgacgctaacgctttacctgctgcggcacaggcggcggagaaccttaaacgcaataatctcgcgattgttggttttagtacgccgaatgtaatgcgcccttatgttcagcgcggcactgttaaagagtttggcctgtgggatgtcgtccaacagggaaaaatttccgtatatgtcgccaatgcgttgctgaaaaatatgccaatgaatgtcggtgattcactggatattcccggcatcggcaaagtcaccgtttcacctaatagtgagcagggatatcactatgaggcaaaaggtaacggcattgtgttattgccggagcgtgtcattttcaacaaagacaatatcgacaaatatgatttctgataactgttatgtatcgacggagtaaagaatggctgatttagatgatattaaagatggcaaagattttcacaccgataaaccacaaactaacactttgttcgcattaaaaggctgtggcgcgctggattggggaatgcagtccagactggcgaggatttttaatcccaagaccagaaaaacggtcatgctggcctttgaccatggatatttccaggggccgacaaccggacttgagcgtattgatatcaatattgcgccgctctttgaatatgctgatgtcttaatgtgtactcgcggcatattacgcagtgtggtacctccggcaatcaataaaccagtcgttttacgcgcgtccggggcgaattctattctcactgaattaagcaatgaggcggttgcggtggcgatggatgacgctgtgcggttgaatagctgtgctgctgccgcacaggtttatattggtagtgagcatgaacatcagtcgattaaaaatattattcaactgattgatgccgggttacgcgtcgggatgccaataatggcagtgaccggggtgggtaaagatatggctcgcgaccagcgttatttttcactggcaacgcgtatcgctgcggaaatgggggcgcaaattatcaaaacgtattatgtcgataaaggttttgagcgtattgcggcaggttgtccggtgccgattgtcatcgccggcggtaaaaaactgcctgaacgtgaagcattggaaatgtgctatcaggcgattgaccagggggcttctggcgtagatatggggcgtaatatattccagtcagaagatccggtagccatgattaaagcggtacatgctgtcgttcatcataacgaaacagcagagcgtgcttatgagctgtttttgagtgagaaaagttaaatgagatcgcttccccatcttttaccgatgcgaggagatggggatgactgttattttatttggaataatcagggggttaatgatgcacgttacgctggttgaaattaacgttcatgatgacaaggttgaacaatttatcgatgtttttcggcagaatcatctgggctcaattaaagagccgggtaacttgcgttttgatgttctgcaggatccgcaggtgcttacgcgattttatatttatgaagcctacgttgatgaacaggccgtcgcttttcacaagacaacgccacactacaaaacttgcgtggagcagcttgaaccgttgatgaccggtccgcggacaaaaaaagtttttatgggtttgatgccttaaggagcgctcatgaacagccagtttgccggattaacgcgcgaagcatgtgtggcattgttagcgtcatatccgcttagtgtgggtattctggcagggcagtggattgcgttgcatcgctatctgcaacagttggaagcgctaaaccagccgctgttgcatttggatttgatggatggtcaattttgcccgcagtttaccgttgggccatgggcagttgggcaactgccgcaaacctttatcaaagatgttcatttgatggtagcggatcaatggacggcggcgcaagcctgcgtgaaggcgggcgcacactgcatcacgcttcaggctgaaggcgatattcatctgcatcatacgctaagctggcttggtcagcagaccgtgcccgttattggcggtgaaatgccggtgatccgggggattagtttatgcccggcaacgcctctggatgtcattatccccattctgagcgacgttgaggttattcaactactggcagtaaaccctggatacggcagtaaaatgcgctccagtgatttgcacgagcgcgtggcgcagcttctctgtctacttggtgataaacgcgaaggtaaaattatcgttattgatgggtcgttaacgcaggatcagttgccttcgctgattgcacagggcatcgatcgtgttgtttctggtagtgcgttatttcgtgatgatcggctggttgagaatacgcggagctggagggcgatgtttaaggttgccggggatactactttcttaccctccacagcataaatgccggatggcggctttaccttatcaggcctacataagcactcggctggtaggcctgataagcgcagcgccatcagacattgattggcaattaagcctgtttagcagcttctgctgctttcacgatcaccgcgaaggcgtcagctttcagagaagcgccgcctaccagtgcgccgtcgatgtccggctgcgcgaacagttcggcggcgttggaggcattaacagaaccgccgtactggataataacctgttcagcgattttcgcgtcagctttagcaatgtggtcacggatgaatttgtgcactgcctgcgcctgcgcaggagttgcagatttaccggtaccgatcgcccatacgggttcgtaagcgataaccgcgccttcaaaggctgccgcgccctgcgttttcagtaccgcgtcgatctggcgtgcgcatacttcttctgttttgcccgcttcgttttccgcttcggtttcaccgatgcacagtaccggcgtcagaccttgttctttcagtacggcgaattttttggcgatcagctcgtcagattctttgtgataagtacgacgctcggagtggccgataataatgtactgcgcgccgatatccttcagcatttcagccgaagtttcaccggtgaatgcgccagacagattcagatcaacgttctgcgcgcccagcatgatgtggctgccggcagcagcgcgtttcgccagatcgatatacatttccggcggagcgattgccacgtcgcagcctgctacgcccgtcagttctttacgcaggttagccaccagttcgtttaccatgtggcggctgccgttcagtttccagttacccatcactaaaggatgtcgcatttcatttctccacgcttagtcagcgaattaaggaagatggccgctcgtcagagcagcatggtctgtgaaacagtatagagattcatccccggaaaggctttgctttttgtcatcaattcgccccttccagattttcagataacgtcagcttaatcggttcaaccgcgaaggtcagccccttttcgccgttatctgcgacaacataacgtaccgcgccttcggtctcggcgtaatagtgtttacctttaccggcgataagcatcttttgcagttttttctggctttgctcttttgtcagtaacggggcgacagtgcgaataatggcggccatatattccagcgctttcgctttcgccgctttctgttccggcccctgaatgggcagccaggtaatctgcatacttttcactttgagcgtaccgcgctccagcgccgtggaggcatacagattttcgttaatcttactggcggcgcgggtcagattcgccttatcgcggctattctcaatggcgcgaaattcattgagcggcagatcgggattctggcggttaaagttctcacgaaactggctaatagaaagatcaaaggttggcgagcccgccagcagatagggcgctgtcgtggtcgatgaagagagctgcgcgtgcgccgttatgctggcggtgagagcagaaaacaacagtaaaaacagagtacatcctggcttcatcaatcttacctttcgttaggactgctcacgattaaaacgataactgtcgggcttgtcaaaagggtaaactgtagcggaaggcaaaatataaggaacttacatgaccatacagcaatggttattctcatttaaagggcgtatcggacgccgtgatttctggatttggatcggcctctggtttgccgggatgctggcgctattttcgctggcggggaaaaacctgcttgatatccaaacggcggcattttgcctggtgtgcctgctgtggccgaccgccgccgtcatggtcaaacgtctgcatgaccggggacgttccggcgcgtgggcgttgctgatgattctggcgtggatgctgctggccggaaactgggtgatgctgccggggatgtggcagtgggtcgtcgggcgatttattccgacgctgatcctggtgatgatgcttatcgatctgggcgcgtttgtcggtgttcagggggaaaataagtttgggaaagcgacacaggacgtgaagtttaaagcagaaccgtaaacgggcggtaaaccgtaatttgcccggtggcgctgacgcttaccgggcctacagattggtgatgatttgcaggccggataagccccagccgccattcggtaaaacatcaccagtaatgttcagccgtcatatgccccggtcggcggcgcagatgtttagtcatctgtcgggtctctttcagcagttgctgcgtatcgcgcaccatctgcgggttcccgcacagcataacgtggctggtctctttatccatcggcaatccaacggctttttccagctcgccgttttcaatgagcgctggcacgcgtccagtaagcgagcctggcacgttctcccggctgaccaccgtttggatgcgcagcttgccttcataacgctgttgcagttccagcattagcggcagatagcttaaatcggcggcgaagcgtgcggcgtggactaagaccagatttttaaagcgtgcgacatcctggccatattgtagaatagacaaatacgggccaatagcggttccggtcgccagcatccatagcgtctcgcagtcaggcacttcatccagtacaaagaaacccgacgcgtcgctgaccacttgcacctcatcgccaggttttagcgccgccagccgcgggctgagctttccttgcggcaccgtcaccagataaaactctaaattcggattgtcaggcgcattgacataggaatacgcgcgctgaacgcgctcgccatcgatctccagtccgagtttggtaaattggcctgcagtaaaaggattaatgggggcgtgaacggtcaggctgaacagtgcgtcagtccagttttgcaccttagtgactttacctgttacccaatcggccatggttttctcctgttctgaatcgctaaccttatcttcgttcgtcaggagaaagatttccagccccgcgaggctggaaggctctaactaacaaatgcgctagagaatatgcgcctgcacatccggatctttacgatcaagatagtggatagactgaatgcggcggatggtgcgtgatttgccgcggatcagcagcgtttccgtcgtggcaatatggcctttccggctaattccttccagtagatcgcctttcgtgatgccggtcgcggagaaaataacgttatcgctacgcgccatgtcgcccaggcataacgccttgcccgcttcaatgcccattgctttgcagcgcgccagttcctgttcgccaatgcggcggttttcttcgctgttgcctttcacgtcatggcgcgccagcagacgcccctgcatatcgccgtccagcgcgcggatcaccgctgcggataccacgccttctggtgcgccgccaatcccgtacagcacgtcgacttcgctatccggcatacaggtcagaatggaggccgcgacgtcgccgtcaggaatggcaaacacgcgtacgcccagtttggccatctctgcgatgacctcgtcatgacgcggttttgccagaatggtcacggtcaaatcgccaagcggtttacccagcgcatccgcgatgttgcgcaggttatccgccagcggcagattgagatcaattgcccctttggcgcccggaccgacaatcagtttttccatatacatatcgggcgcattcaggaaacagcctttatcgccgaccgccagcaccgccagcgcgttcgcctgacccatcgccgtcatgcgcgtgccctcaatcggatcgacggcgatatctaccgcatcgccgtggccggtaccgactttctcgccgatatagagcatcggggcttcgtcgatttcgccttcgccaatcacgatggtgccgtcaatgttgacctggttgagcatgatacgcatggcgttgaccgccgcgccgtccgcggtatttttatcgccgcgtcccagccatttgtagccagccagcgccgccgcttcggtcacacgggaaaattcgatggcaagttctcgtctcataacaaactcgtagcaaaaaggagtggcgcgcagtgtagcacaggggaaggagggaataattgatgtgtgtgcggagttgcctccgcacaaagattttgccggatggcgaccttacttgtcgtgctcttcccacgccattgcgcgtttaaccgctttcttccagccgctgtaacggtagttacgctcggtggtttcaatgccggggcggaattctcgctcaatgacggctttttcctgcagctcgtccaggttctgccagtaaccgacggccaggccagccagataggcggcgcccagcgcggtcacttcgcgcacttccgggcgttccacccgcgtgccgagaatatctgactggaactgcatcaggaagttgttggccactgcgccgccgtccacacgcagagcgtgcaggcggataccggagtcggcctgcatcgcttccagtacgtcgcgggtctggtaagcgatggattcgagcgtcgcgcggataatgtgattagagttcacgccgcgggtcaggccaaaaatggcgccgcgggcatacgggtcccagtacggcgcgcccagaccggtgaaggccggaaccacgtagacaccgttggtatctttcactttcgtggcgaaatattcggagtcgaacgcgtcgctgatgagcttcatttcatcacgcagccattgaatggacgctcccgccataaacaccgcgccttccagcgcatagttgacttcgccgcttgggccgcaggcgatggtggtcagcaggccgttttccgattttaccgctttctcgccggtgttcatcagcataaagcagccggtgccgtaggtattctttgccattccttcctttacgcacagttgaccgaataacgcggcctgctgatccccggcaatcccggcgataggaatacgtgtaccgcctttaccgccaatattggtctggccgtagacttcggaggacttacgtacctggggcagcatcgcgcgtgggatatccagcacgtccagcatcttatcgtcccagtccaaatcatggatgttgaacagcatggttcgtgaggcgttggtgtaatccgtaacgtggacgcggccctgcgtcatcttccagataagccaggtatccaccgtaccgaacagcagctcgccacgcttcgcgcgttcgcgcgaaccttccacatggtcaaggatccatttcactttagtgccagagaagtacgggtcgacgaccagaccggtattgtcgcggatgtaatcttccaggccgtcgcgtttaagctgttcgcaaatatcggcggtacgacggcactgccagacaatagcgttgtatatcggtttgccggtttcacgttcccagacgatcgcggtttcacgttggttggtgataccgatagcggcaatctgatcggaactgatatcggccttagccagcacttctaccagcgttgagctttgggacgcccaaatttccatcgggtcgtgttctacccagcctggcttaggataaatttgctcaaattcacgctgtgatacgctgacgatattcgcgtcatgatccataacgaccgcgcgggagctggtggtaccctggtcgagcgcaacgatatattttttttcagtcataattttgtcccgtaatcagattacagcgaagcattttgttgtgtggtcgcggtggagtccttctcttccacgacgcaggtatcgcacggcaaatgacggccaataaatttgcgataagcaaacgcgcccagaatggcgccgacgatggggccaaacagcggcaccaggaagtaaggaatgtctctaccgccggtaaacgcaatttcaccccagccggcaagcccggcgaacattttggggccaaagtcacgcgccggattcatcgcaaacccggtcaacggccccatagaggcaccgataacggcgatcagtaaaccaatgagcagtggcgcaagcggaccgcgaggtacgccgtttccgtcgtcggtcagcgccagaatcagccccatcagaatagcggtaatcaccatttcaaccgcgaaggcctgcacaaaattgatatgaggattcgggtaagttgagaaaatgcctgcgagatcgagactttcaacgctgccacggacgatatggtgggtttgttcgaagtccacaaaaagattgtaataaagcccgtaaactaacgccgctgcgcaaaaggcgccggcaacttgagaaataataaaaggaacaactttacgtttgtcgaaacaggcaaatagccagagtgcgatggtcactgccgggttcaggtgtgcgccagaaacacctgccgtcaggtagatagccatcgctacccccagaccccagatgacgctgatttcccactgtccaaaagtagctccggcaactttaagcgcagcgacacaacccacaccgaaaaaaatcaacaacccggtaccgaggaattcagcaatgcactggccttttaaggttgatgtttgactcataatcggatcctgaagagtatgtaatgattattggtatgcgaggaggtcatggacatccacgatgccctgtaggcacactgttaatttatcgttaacgagcaaaaacgagaaatatcgaaatcaaaatgtgtgtactgcgtcaataaaatgagcgttatcgcgccatgaagcgcattttgagacagcagaagagagtgaattgaatcatttcattaaccaatatgttaacacttttaagttattgaatgaatgttaccaggagatggatgaaaattgctgcaaaccgcgatctacgcggtatgtcgctggacagcgagagcggggcttcatacaatcgacactatatattgtgcgcgtttacgtgaagcgtcgccttgcaattcaggagaggtaagatcatgtctttagaagtgtttgagaaactggaagcaaaagtacagcaggcgattgacaccatcaccctgttacagatggaaattgaagagctgaaagaaaagaacaacagcctgacgcaggaagtgcagtctgcacagcatcagcgtgaagaactcgagcgtgaaaataattctctgaaggaacagcagagcggctggcaggaacgtttgcaggcgctgcttggtcgtatggaagaagtctaatcctcgtcatatttcacgttatggcggcgttggctgcgtgcgttcaccccagtcacatagtggcctatgctcctggggattcacttacttgccgccttgccctgacgcgaaatctatagaggatttagaatgcggataccggtgggccggataaggcgtaagctgccatccggcaatcagcgacaacgcataaaaaaggcgccttacggcgccttttttgatcactcgatatcaagcgggtcttcggaaaggataatcccggtgttgtcggcatagagatgatcgccggagaagaacgtcacgccgccgaaattgacgcgcacatcgctttccccaatgccttcacctgcggcgccaaccggaatggcggcgatcgcctgaatgccgatatccagctcttccagatcgtccacctgacgcaccgcgccatagataaccagcccttcccattcattttgcgtggccagacgcgccagctccgcatcgactaatgcacgacggacagaaccgccgccatcgaccagcagaacccgaccacggccattttgttcgagcagatcgtacagcaacccgttgtcctcgaaacattttaccgtgatgatttgtccgccaaacgacgaccgccctccaaaattagagaacagcggttccacgacgttgacatcttcctgatagatgtcacaaagctcggaagtatcgtatttcataggcttaacgttcagttgctgcgagaatttttagtatatcgcgctaagtatactgttggcaaaatcatcaattgttaattgatatttgtcagttaaacggcccactgacttaagagtatcccaatcacaaataacaggttggttaacaacgcgcctttaacggtacgttcaagcatcgggcgcattgccgcaggctccctttcgcgcattacgtagcgcgcttgtttaatgagcaagggcgcggccagaataaacaaccatccccacggactgtgtagcgagagcagattaaacagcgccagacagagcagcgcgcctagcaacaggcaggcgtgataacgacgcgcgttgacatcgcccagtcgtactacaagggtgtttttgccgttctctctgtcgctattaatatcgcgcaggttattaatattcagcaccgccgtcgccagtaaaccgcaggcggtggccgggagaatcagcgccggaatcagcgtatgcgcctggagataccagctccccatgacacttagccagccaaagaataccaggacagagatatcacccagcccgatatagccgtagggccgattacccacggtgtaggtgatggcggcgataatcgacagcccgcccaaaatcaggaagccgacaaaatcggttaacgtatggcacgcgaccgccaccagcgccagtccggagatacagatcagcacgacggtaatgattaacgcccgcttcatctcctgtcgggtgatgacgcctttttgcatcccccgcagcggcccgatgcgatccggtttatcgctgcctttgacagcgtcgccataatcgttggcgaggttggataaaatttgcaacagcccggcggtgataagggccagcagcgcgaccagaggatcgaaatagccttgccaccatgccagggccgtaccgacgataatcgccgcgaaggcgaggggtaaggttttgggtcgtaagctttccagccaggcctgggtgcggctaatttgttgttgttcagtcatatttagcgccaataaaaatggggcttttcagccccatcaacagtgatgaaaatgcattggacgcgattataagataaaacggcttagatcttcatctgcgaccagcgcatccagatgtttgctcacatattccgcatcaattgtgatgttttggccgtgcagatcgctggcgttataggaaatctcttccatcagacgctccagtacggtatgcagacggcgcgcgccgatgttttcggtggtttcgttaacctgccaggcggcttcggcaatacgtttaataccggaatcggtgaactcgatattgacgccttcagttgccatcagcgctttatactgcacggtgacggaggcgtttggctcggtcaaaatgcgttcgaaatcgctggtggtcagcgcctgaagttcaacgcgaatcggcagacggccctgcagttccgggatcagatcagacggcttcgccacctggaacgcgccagaggcgataaacagaatatgatccgttttgaccatcccgtgtttggtcgaaaccgtgcagccttctaccagcggcagtaagtcgcgctgtacgccttcgcgtgaaacatccgggccggaggtttcgccacgcttacaaattttgtcaatttcatcgataaacacgatgccgtgctgttcaaccgcgtcgatagcgtcctgtttcagctcttccgggttgaccagtttagcagcctcttcttcaaccaacagtttcatcgcgtctttaattttcagcttacgcggtttctgtttctgaccgcccaggttctggaacatagactgcaactggctggtcatctcttccatgcccggaggcgccataatctctacgcccatcggcgcggcggcgaggttaatctcgatctctttatcgtcgagctggccttcgcgcagttttttgcggaacgtttgacgggcggcagaaggctcctgctgctgttcggcctggccccagttattttttgcgggtgggatcagtacgtcgagaatacgttcttccgccaactcttccgcacgatagcggtttttctcgatagcctgtacgcgaaccattttcaccgcggcatcggtcagatcgcggatgatagagtccacttctttcccgacatagcccacttcggtgaatttggtggcttcgactttaatgaacggcgcgttggcgagttttgccagacgacgggcgatttcggttttaccgacgccggtcgggccaatcatcagaatatttttcggcgttacttcgtggcgcagctcttcatcaagctgcatacgacgccagcggttacgcaatgcaatcgccacggaacgctttgcgttatcctggccgataatgtgtttgttcagttcgctgacaatttcgcgtggggtcatttcagacatgagaggtccttacgctttggcggtcaattcttcaatggtgtggaaatggttggtgtaaatgcagatatcgcctgcaatatccaacgccttttcagcaatttcgcgcgcgccgagctcggtattttccaacagagcgcgagcggcagcctgggcataaggaccgccggagccgatagcaattaaatcgttttcaggttgcacgacatcgccgttacccgtgatgatgagcgaggcggtttcatccgcgacggccagcaacgcttccagtttgcgtagcatacggtcggtacgccagtctttcgccagttcaacggcggctttgaccaggtgcccctgatgcatttccagtttacgttcaaacagctcgaacagcgtgaatgcatccgcagtaccgcccgcaaagcccgcaatgaccttgtcgttgtagaggcggcggactttcttcacgttgcctttcattactgtgttacccagtgtggcctgaccatcaccggcgattaccacgtggccgttacggcgtacgcttactattgttgtcacgagcagaccccttggttactaatgctgaattgcggccccgtacggcgtacggggcataatgcaagtatagatgggggagattttgagggtttcaacccccggtggcgagtcgaatgcagtttgtatggcccgccatcttcagacggttaatggtgctgtcggcattttctttacctttcaccggcccgataaccacgcgattccagccgttattggtggtaattttggagtcaaagccttcaaacgccagctgagcgcggacgctttctgcctgctcggcgcctttgaatgaaccacattgcaccatccagcgacgttcatcttttttctctgctgtcgccttcggcgcttcaggcgcgcgcgtaatgggcgcggcttttggcgctgccgcgctggtatgcgccggcgtttgcagcaaatcctgataaggttgctgcgaggccgtctgcttcggcggctgactttggcgcgcgggttgcgccggggcggactgtaccgtgcgcgtttgcggctgttcgtttacccgcggctgcgtacgtggttgctgaacaggctgcgtttgagcccactgctgctgctgcgcctgacgctggcgctgtagcgtttgctggcgttgttctggcgtctgctcgttccacggcacttcgttaagttgcgtcggctgctgacgcatatccgcctgcatctgttccaggagttgacgctgctcgctggtgagctgattcggattcatgacttcgccgccggcggacggttccgttggcgtacgcacgcccggctggcgactttccagctctttgatgtaacgccagcgctcttccggttttggcggaagcccattgccggtgactttctggttttgtagcgtttcggactcttctttcttatggtgagtaatgaagtacagaccgccgataaaggtcacaaggacggctgccgcaatcgcgaccattgccggcgagacggcaggcatgttgctttgcttcttccgtgagttccgtgaggtgctctttttgcgccgcgaaggagccggttggccgcgacgtacataatctcgttgtgccactatcgtttcgctgtatttattcgttcgtcagcccgtcatgttactgaagcggcgggcctttgaccagacaggtgagtcttaaagctatttactttagggtaaagcgcgcgtagaaccgcgaataatcagctcgcaatccattaaacgcgagccgctgctcacattttgcccctgcatctgatcgagcaacaacagcatcgcctcgcgaccaatgtcaaaacgcggctgcgccacggttgtcaacggagggtcgcaaaactcggccagcgcgatattgtcaaagccgataatcgacagatcgtcaggcactttcagaccctggcgcttggcccaggagagggcgcccagcgccattacgtcgctatgacaaaagacggcggtaggcggcaacggttgctcaagcaactgctttaatgcgtttgccccggcttcaaaggtaaagtcgccacgggcgatgtaatgcggatcgaccacaatgccactgcgtcttaatgcctgtacgtaaccttgtaagcgatagtgacagagcggcatatcttccggccccgcaatacaaccaattcgcttgtggcccaaatccaacaggtagttcatggcattgaacgcggcggtgaggttatcaatatgttccgtcggcagttcaagctccggcgcgaactcattcgacatcaccatcggaggcaaattgcgctgctcctcaacgctggcgtcaaagggcagtcgggaactgagaagtaccatgccgtcgatctgtttggtgatgatgagattaagaaaggttttttctttctggttttgatgggcgcaatcgccaatcagcaccagatacccctgttctgccgcggtcacttcgataccgcggataatttcactgaagaagggatcgcaaatatccgggacaatcaccaaaatcgtacgggattcattgcgttttacatttcgccccatcgactgcgggaaataacccacttcaagcgcggcctgttcaacccggctacgggtcgactgggagactttatcggggttcattaacgcgcgggatacggttgccgtagagactttcgccttcaacgcaacatccttcatcgtagcggcagtaacctgcttgttcgatttcactctttctcctcgcctgggaactgctggcgcagatctatccctggtaacactcatcgaaaacatttttatcagatagtgcgtggaagcggttacagaattttcataaaaagtgtgatggatctttaattttacgatccgcctcgcatcgtgaggactatccttcaatcggatcgacgtccagaacccatttaactttccgcgcttccgggagcgtattgatcaacgccagcgtgccgctgatgatgtgttgcaggcgaatccgtgaaggatgctgaagtaaaatttgccagcgatagcggccgccgcgttttggcgcgagggccggaaccggacctaagatccacagcttatcgtctgatagcgggctggcctgaatcagattacgcaactgttggagaaagacgggcgcctgctgattgttatgatcctctgcgcgaataatgacgtggctggtccacggcggaagctggagcgtttgccgttccgccagcgcctgctccgcaaacgcatcatagcctttatacagtaacgtttgcagcaggggatgctcaggatggtgcgtttggagcaccacttcgccctgtttgcccgcgcgcccggcgcggccggaaacctgagtgtagagctgggcgaagcgttccgccgaacgaaaatctgcggaaaaaagcgcgccatcgacatccagcaacgccaccagcgtgacatccggaaagtgatggcctttcgccagcatttgtgtgcctatcaggatgcgtgctccgccgcggtgaacttccgccagatgctgctccagcgcgcctttacgactggtggtatcacggtcgattcgtgagatcggcacgccggggaagaagggcgccagcacctgctccagctgttccgtccctaacccaaccggtaacatatgtgtggagccgcaggaggggcactgacgcggtaccggacgctggctgtcgcagtgatgacagcgtaaatgatgctgcgcctggtgcagcgtgtagtagtgatcgcaacgcgggcactctgcaatccagccgcagtcgtggcaaagcagcgcgggcgcgaatccccggcggttaagaaataaaattacctgattgtcggcctggagatgttggcgcatacgggcgataagggcgggcgccagtcccgcctgaagacgctggccttttaaatccagcacatgctgcagagctgggcgggcgttgcctgcgcgccgcgtcagacgcagcatccggtattttttctgccgcacgttacatagcgtttccagggctggggtggcggagccgagaataatcgggatctgctcgctatgggcgcgatacactgccaaatcgcgggcgtggtagcgccacccttcctgctgtttataagagctgtcgtgctcttcgtcgatgacaatcacgccaagatttttaaacggcgtaaacagcgaggaacgcgtgccgatgacaatcgccgcttcgccgtttttcgctttcagccatgccgaaagacgctcgctgtcgtttagcccggaatgcagcacttccaccggcgcgttaaaacgttcgcgaaaacgggcgatcgtttgcggcgtcaggccgatttccggcaccatcaccagcgcctgtttgccctgggcgaggacgttttccagcacgctcagatacacttcggtcttgccggaaccggttacgcctgccagcaaccaggcggagaaaccgtccgacgcgctgtgaatcgcgccgactgctgtcgcctgttcggtattcagccgcaggcgctctcctgcgacggcataacgctcccgccagtcggtaaacgcgggcgtttcactggcaagctcacaaagtcccttacgccgcagcgtttgcagcgtggcgtcagtaaaatcaagctcggctacctgatagcgccagatctttccttgccgtagcgccgccagcgcctgttgttgtttggcggagcgtttcaggctgttgatatcgacggcttgcccctcttcggtggcgaaccaataccataggggcgcgttgctggctggttttccctgacgcaataaaaccggcagagcgtgaaacagaacgtcgccgaggggatggtggtagtaatccgccgcccagaggagtaagcgccagatggagggagaaaagattggctcgttatccaggatttcaatgaccgattttaattcatcgagcggcaattcgctgtggtcgctaatcgagacgacaatgcccacgcgctcttgctgcttgccgaatggcacgcgcacgcggcacccggctttggcgaccccgccttccggcagcaggtaatcaaaggttcggggaagcggaacgggcaaggcaacgtgcgcgacggacatagcatcttcctgacttgaaatttcgtcgggtagtatacacattacgataagggagcgcggatcagtttgcatacggtggtcaaattctgtatgattcgccgcctttggtgcgtgttgtgagcatcaaaccctttactattaacttcgcgtggtgtctggcgttagggctggaagagcgacgcggccttacactgaggttccccatgaaaaaaggtattcacccgaattacgtagaaattactgcaacctgttcttgcggtaatgttatcaaaacccactctaccgtgggtcacgacctgaacctggacgtgtgcggcaaatgccacccgttcttcactggtaagcagcgtgttgttgataccggtggtcgtgttgagcgcttcaacaagcgcttcagcatccctggcagcaaataagttaccgccagaaaaaaaagcgccgcagggcgctttttttgttttctagggataacagtatttgttcagacacattctgtgatccgtaatcgctttcattacgcttcctgccgtgagttttaacgaaggatttatagtcagtcccgcactttccagccccttcgctgtccatttattgcaggtattgagtatgccgtagcggccattcgcggcgtaaaactggctatcgccgtaaattccttgttttaacggaatcagattacccccttcgtcacgcgcaaagctgcggcccagatagcgcatcagactgttacgctggtttgtgtgcaggagcagtgattttatctcgctaccgacgaaatagcgttctggttgaccggaaaaggcgacgatgtgcataaccgcgccggatgaccagaacatggcctggagcgtaagcgcggtggttatttcttgtgactgataaaagcccttatcgccccagccgatttcataccactgcgtctcctgagcgaaccgttttttaagctgtggcagaacggtattaacatcatgggccggcgcaataattcccgtgtgccagccatgactgacgatatagatttccgtcggggagggctgtccgcctgtcgtaggttttacggcttgtggaaaggttgtgcagccatatagcaataaacttatccaggcgataaagagatttttcatgacatatcaccagcaaaggcgcggtatattgtggcgtttgtctaatgacgctgcgcttatcgggtcggtgccggattggtaattcattgatatttttgcattcctcttcgagggcaataaggcgaatgtcataactacaatacgttttaaccattcaggcggaagttagcttccgcctgttttacttttactatctcgctttattttttaaacatctgctctggatcgataatcagcgcccgataacccagcataccggcacggttactgtgtacttttagctccagcatcacatcctgagtaccgtctttgacttcatccagaacggaaacgatcggttttgtaccgctcattcccgctgtggccgagtacatgaacatcgttttggtttccgggcgatattccgtgacggaagtaatggcgctgtaccagtcaaaaccgcgctctttaccatattcccacatttgggaaaccgtcatatttttttcgtcaatttgatattccacgccgcgggaatatttcattgatggcatggccggttgttccatgccgcgcgcatcgccgttatcaaaggcggtcacgacggttttacctccggtgcttttggatggcactaaccaaccggtatgttgtgtccatgtccagtcaaatccaccgtcgcagtggtgcgcttcgcaggttagcggtttaccgttgctgtctacgggtttcagcacttttttcgccagttcgcctttccagccggatggatcggaaagtatccatttcacttttttatcgcgaccaattttgatgatggcagactggtggcgcgagctaatgataatgctgtcgtcgcgaggatcgtagctgacggagttaacatgcgcccagttgcggcccgggccggagcccgcgatatcgccgaagggttgttttgcaagctgctctttggtcatgacctgaccggaatgttcggcatcgacgctcaaacataccgctccctgatccatcgccagaataacgtcgtcacgataggggtcgaggatttttggcagatcccagtaatcgacggtatcgccgttctggtcaacttcaagaatatgatcacgcacagtattgatggtgtatttaccatttaatggataattttcttttgcgacacgcagcaggtaggtgcctttcggcgtttcggtaatggcgtgcgaaaaatcaataaatccttttggcagtcgtttatcggaaataacgcggcctaagaaatcatatttaaagtaacgttgaccctggccaaacataagattgccatcgttaacctgatggaagcccatcatggaaccaaagcgcgttatatcatcctggttacggaatttatcaatattcatatagccgcgaacatcgccattcgtatcgctaatccagttgataccggtataatcccagttcgccgcgccgcctgcgacatgcataatgtggccggctcttggcatccccgttatatggttaaaaagatataagcggtttttaagcgagctatcgactttaaccggttctaccgtaggaagaacggcagtttgcccggtagtagagggtaatgataccggtgcggcgtaaatggaccacgtataagtttgttttttaccttcttcagtccagtcaactttaactttattgacataatctggatacaagccaaatacaggtatgccgtcatgggtatttatagcctgcgggccgacatcataactgatcgggatgcctttttcccctttccctaaaacggtaaccttcacgtcctgtacattatgattggctttattaatgattgctgttaatgggaaaacgccgccgtagggagcgacatcgaccatacctaatggcccttcatggactggaatgacatctgctgatgcgaccattggcctgtttgggtctaaaacgcctgaggccaaaacgctgccgctcaaacacaggcagcataatacaggtaagactttccttgtaaataacatatttatttccccattcgatattatcgataaaatgaatgtatattaaccttcttatttatcggagatgaaaaaacatttaaaaaagtaaaacaatccgcggaggggaataatgatgttggtcacaaatatgaggtgtccatagtctttttaacaatactcattgttatactatttgttcagtaaatatatggcgctgtattattattcatatgcgctttgctacgtgaaacattaaataaatattagaagtttaaatataataaaattatatcggttataacatgccgggaattttttccaggaaaataacgaagagaaacttatcatgtctgacaaatttatccaccgagggttattcgggaagatgaacatttagaacaatgtcggagatagccgtgtacaaggggaatcgttaaaaaagcgcggccagaggcgttctgaccgcatgctttgctatcagtattcccacgtttccggatcaatccccaactcacgcatgatctcttttgccgcttccgggatttcatcgctgcgctcttttcgcagatcggcatcatccggcaagggttgcccggtaaaggcgtgcagaaatgcttcacacaacagctcgctgttggtggcgtggcgcaggttgttcacctgacgacgcgtacgttcatcggtgaggatttttaacaccttcagaggaatggaaaccgtaatttttttgacttgctcactcttcttaccgtgctcagcgtatgggctgatatattcgccgctccattcagccatgagatacttaatcctcttcgtcattaatattgaggtctgaacctgagcccggaccataatcgcgcgtagtttaccgtagtggcgcggccctgacacgaagttagcggtcgcagatgtgcgctaatgcatataattttaacggctatttgcggtttgctcaatctatacgcaaagaagtttagatgtccagatgtattgacgtctattgtggtagtggttaatctgtggcctgactttcaccgactcagccaggaatatcttcatatgacgcgtaaacaggccactatcgcagtgcgtagcggattaaacgatgacgaacaatacggctgcgttgtgccgccaatccatctctccagtacctataactttaccggtttcaatgagccgcgcgcgcatgattattcccgccgcggtaatcccacgcgtgatgttgttcagcgcgcattagcggaactggaaggcggcgcgggcgcggtattgacgaataccggcatgtcggcgattcatctggtcaccaccgttttcctcaagccgggcgatctgctggtcgcgccgcatgattgctatggcggcagttatcgtctgtttgacagtctggcgacacgcggctgttatcgtgtgcggtttgtcgatcagggcgatgaacgcgccttacaggcggcgctggaagaaaaaccgaagctggtactggtagaaagtccaagtaatccattgttacgcgtggtggatattgcgaaaatctgtcggctggcgcgcgaggcgggcgcagtgagcgtcgttgataacacgtttttaagcccggcgctgcaaaatccgctggcgttgggtgccgatctggtgttgcattcatgcacgaaatatctcaacggtcattcggatgtcgtggccggcgtggtgattgctaaagatccggaagtggtcactgaactggcgtggtgggcgaataatattggcgtgaccggcggggcgtttgatagctatctgctgctgcgcggtttgcgaactctggtgccgcgtatggagctggcgcagcgcaacgcgcaggcgattgtgaaatatctgcaaacccagccgttggtgaaaaaactgtatcatccgtcgctgccggaaaatcaggggcatgaaattgccgcgcgccagcaaaaaggctttggcgcaatgttgagttttgaactggatggggatgaggagacgctgcgtcgttttctgggcgggctgtcgctgtttacgctggcggaatctttagggggagtggaaagtttgatctctcacgccgccaccatgacgcatgccggtatgtcgccgcaggcgcgtgcctccgccgggatctccgaaacgctactgcgtatctccaccggtattgaagatggcgaagatttaattgccgacctggaaaatggcttccgggctgcaaacaaggggtaaacatgagtgtgattgcgcaggcaggggcgaaaggtcgtcaactgcataaatttggcggcagtagtctggcggatgtgaagtgttacctgcgtgtcgcaggcattatggcggagtattcgcagcctgacgatatgatggtagtgtccgccgcaggcagtaccaccaaccagttgattagctggctcaagttaagccagaccgatcgcctttctgcgcatcaggtattacagacgttacgccgctaccagtgcgatctgattagcgggctgcttcccgccgacgcggcagatgatttaaccagcgcttttattagcgatctggaacgtcttgccgccttgctcgacggcggcgtaacggatgccgtctatgctgagatcgtcggacacggcgaaatttggtcggcgagattgatgtccgccgtcctgaatcagcaggggctggatgccgcctggctggacgcgcgcgcatttttacgcgccgaacgcgccgcacagccgcaggttgatgaagggctatcttatcctttattgcagcagctactggcgcagcatccgggcaaacgtctggtcgtgaccggctttatcagccgcaatcatgacggcgaaacagtcctgttaggccggaacggttccgactattccgccacgcaaatcggcgcgctggcgggcgtttcccgcgtgaccatctggagcgatgtcgcgggcgtttatagcgccgacccgcgcaaagtgaaagatgcctgcctgctgccgttgctgcgtctggacgaagccagcgagctggcgcgtctggcggcgcctgttctgcacgcccgcacgctacagccagtgtccggcagcgatatcgatttgcagttgcgctgtagctacacgccggatcaagggtcaacccgaattgaacgagtgctggcttccgggacgggcgcgcgtatcgtgaccagtcacgatgatatctgtctgattgagtttcaggtgccagccagccaggatttcaggctggcgcataaagagctcgaccacattttaaaacgggcgcaggtgcgtccgctggcggtgggcgtgcatcgcgatcgccagctattgcagttctgctataccgccgaggtagcggatagcgtactgaaactcctcgacgatgtcgggctgccgggcgaattgcgcctgcgacaggggctggcgctggtggcgatggtcggtgcgggcgtcactcgcaatccgctacactgccatcgcttctggcagcagttgaaaggtcagccagtggagtttacctggcagtcggaggagggcatcagtctggtggcggtgctgcgtaccggcccaactgagagcctgattcaggggctgcatcagtctgttttccgcgccgaaaaacgcattggcctgatgctgttcggtaaggggaacatcggctcccgttggctggaactgtttgcccgtgaacaaagcacgctttccgcgcgtactggttttgaatttgtgctggcgggcgtggtggatagccgccgtagcctgttgaattatgaagggctggacgccagccgcgcgttggcattctttgatgatgaagccgttgagcaggacgaagagtcgctattcctgtggatgcgtgcgcatccgtatgatgatttagtggtgctggatgtaaccgccagtgcacagttagccgatcagtaccttgatttcgccagccacggttttcatgtgattagcgccaataaactggcgggcgcaagcgccagcgataagtatcgccagattcatgacgcgtttgaaaaaaccgggcgttactggctgtataacgccaccgtgggcgcgggattgccgatcaaccacacggtgcgggatctgattgacagcggcgatacgattctctcgatcagcgggatcttctccgggacgctatcctggctgttcctgcaatttgacggtacggtgccgttcaccgatctggtggatcaggcctggcagcaggggctgaccgaacccgatccgcgcgtcgatctttccggaaaagatgtcatgcgtaagctggtgattctggcgcgcgaggcgggatacgacatcgagccggatcaggtgcgtgtagaatcgttggtgccggcgcattgtgaagaaggatctatcgatcactttttcgaaaacggcgacgcgctgaatgaacagatggtgcagcgtctggaggcagcccgcgaactggggctggtgttgcgttacgtggcgcgtttcgacgccaatggcaaagcgcgcgtcggcgttgaagcggtgcgtccggaacatccgctggcggcgctgctgccgtgcgataatgtctttgctattgaaagccgctggtatcgcgataacccgctggtgatccgtgggccgggcgcgggtcgcgatgtgaccgccggggcgattcagtcggatatcaaccgtctggcgcagttgctgtaataaaggcaagttcgtgagcgaagcgccgggttgcgcttcgctccctcatcaatacgttatgcagtcattctgtagatactgatatacgaagcgccatccgattgctgacgaaacattatggcgtgatgctttttacattctcaacccggacatccatccgggggtaaggaatattgatgccgttttcatccattgcttccttgatattttccagaagatcgtagtaagtactccagtactgagcgttgggcacccatacgcgaacatagaaattcaggctagagggcgcaagttcgcccaggcggaccgtaatatcgcgggttttatcaatgcgatgatcttgctcaataatacgatgtatcacgttttttacgtcagcaatacggctttggtaatccacgccaataatcagatcaatacgtcgataggggtgtcgtgaatagttgataatattatcagcaataattttaccattcgggatgacaacttctttgctatccgcagtgagcagagtggtggagaaaatatggaccttttctactgtgccgataaccaggccaatttgtacaatttccccggcgcggaaaggacgcagggagacaagcagtacgcctgcggcaaagttggaaagtgacccttgcagcgccaggccaatggctaaacccgccgcgccgataacggcaataattgaggaggtttctataccgacacggccaagagcggctactgccgtgaaagctatcgtgatgtagcgaaccagcgcggagaaaaagtggacaatagtggcatccacttgccgcctgagaagtaatttttccagccccctcgatagtaagcgagctattaacttaccgatgaaaagtagaatgatggcggcaacaacattccagccaaaatgaattaccgagtcactgtgctcggccatccatttgatcgcgcctttaatttttggaaataactcaaaaccttccatgtttatcctctgtcagcagtatccgcggtattagcggtaataaaacggttcatttttgcctggataatcgccgcgccgacgggtggcagcagtaacgcccagaatagtgtccagccggttcgtattccgccatcttcgtttttattcgccagcagagcgcggatttcgtcgctaagcgtcagacacaatatggctgtgccaaacggcataatggctgacagccatcccgcgccacatgcggtcatgagtcggggcgaaggcgccacaaattgcatttcccggtgaattctgaagaaccaataaataatataaaatggaatgaaaaagcccaataatgcgacgacaaggggttctgcgcactcaggtcgctgggttgatgagaaccttttgggcggtgcaatatagaaaagttcttttttgagcggtaatagtagcaaaagcgcgataaccgctaaagtaattacgattattcctatataaggaattgagtatataaatatagacagatagccagcgatgataaatttgaacagtaagcagaggctaaataaaataacaaatgtctgagcactgccgatagcgctgaaaagcagcatggggactaacagcgttatgatccccatacccagattaattaaaaactgcgctatgataagcctgactacgtcagacgggccatttatgcagaaggaacagaccacgccaatgattaacaggagcgcaacaaagtagaaggggtaacaattttttatacggcagacaaaccagctggcaaccatacccaggaggtatcccagttggccgcaaacgagaataacaccaatacgatcggctggaatagacagtgatttactccaaaaataaacaccatacgacgatcccagcgaactgataaaagagagcaccaaaaagaaaaaagtgatcccccagaatcgatagctactcaggagatcggcgcaggtccattttttatctgacattgacggtaaagtaatttccatatttatcccttgttttccatagaaaataagaatgtatagaactatttaaattgataataaatattgattatgtgaataacgtttatagccgatcttaacttaaaacgaagggccattttataaaatagttctattctttttcagcgtataaaagcaggatgtgaggtgattaaatctatagcgccttctgaatgataatctgtgattttttatgcgtggcattacatcattgggttaaatgtgattccattgtgaattatatttttccgtcagaaaatacagaatttgcgtgacgcgtttggcggaatagtgggcgctttgctggaattcaggttgttgccatagccaggtaacaaagcggcgactggccgccagattaacggcgacaccttgttctaagtgggaaccggttaacgaacagaccattttgcggttgtgaccttgcccccagagttgccactgattttgccaccatccctgccatgttttgcctaacagttgccactctgcgcggcaatcgtcatcgtttatctcttcctcaacgaaccacagcgaggagagacgctggcgaaaccgctccgcccatgccgtaatgaccgcgccgcgcaaaaaacactcatgggcaatgatgtgtgtcgcgacatcaggaaagcggtttttcagcacccgaaaatgaccatgcgccgtaatgaccgggcgaagtattgttccttgcgcgttacgtttaagcgccgccgggccatactgaatctcatcgaactgacttcgctgtaaaaattgccgttctttaatggcgatacggtgaataatatcgcccttctcgccctcgggcggcgcaattcctttccagtggtaatgcaaactttttccggcagacagtaacgtgaaattgctggaaaggtgaagaatattgccgcgaacagcatcaaaactgaataaaaagtacaattgctggaaggcattcgctccctgaaacggtacgagcagcggaatactgcaaatctgttccggcgtttcggcgacattcagcgcgtgctgttttggcgtccagactttcttacagtactggcactgaagtcgctgcgttccgccgggattacgtccataacgaatccatgttttttgatagcagtcggggcaaaagtgaccatgctctttggcatattgcgcgatataagcagacgcccagcggcgaaattccccctcgttgaagagcggcggataactgccgcaggctcgacaatgcaatgccggataacccaggcgatagtccggccacacataatccggcgagtcaggcagcccaagattgcgacaaccagcgcttttgcaggcattaatggtgaacagaggcggcatacattttaccaacgattttggcaggtcgttgattctgccttcataaaacggtacgcgggtgtgaggactctcacataaaaaaacctttcagaacgtaacgtagcgaatctttatatgactgaaagggacttatttatgaaagtaaaactgcttgctgccggtattttgttcacgctgccgttctgggcctgcgccaaagatgtcaccattatttacaccaacgatctacacgcccatgtggagccttataaagtaccgtggattgctgacggtaaacgcgatattggcggttgggccaatatcaccacgctggtgaagcaggaaaaagccaaaaataaggcgacgtggttttttgatgccggagattactttaccggaccgtatatcagcagcctgacgaagggtaaagcgattatcgatattttgaataccatgcagtatgacgctgccactatcggtaatcatgagttcgatcatggctgggacaatacattgttgcaactgagccgggcgaaattccctatcgtacagggcaatattttttatgaggacagcagtaaatccttctgggataagccgtacaccattgttgaaaaagatggcgtcaagattggcgtaatcggcttacacggtgtctttgcttttaatgatacggtatccgccgcgacgcgcgtgggcattgaggcacgcgatgaaattaagtggctgcaacgttacattgatgaacttaaaggtaaagtcgatctgaccgtcgcgctgatccacgaaggcaccccggcccgccagtccagcatggggaataccgatgtgcgacgcgcgctggataaagatattcagaccgcaagtcaggtaaaagggctggatattttgattaccggccacgcgcatgtcggtacgccagaaccgattaaagtcggtaatacgctgatcctctcaacggacagcggcggtattgatgtgggtaaactggtgctggattacaaagagaaaccacaccactttacggtgaagaacttcgagctgaagaccatttttgctgatgagtggaagccagatccgcaaacgaaacaggtgatcgacggctggaacaaaaagctcgataaagtcgtgcagcaaacggtggcgcagtcgccggttgagctgacccgcgcgtatggcgaatcgtcgtcgctggggaatctggcggcggatgcgctgctttttacggcggggaaagacacccagttagcgcttactaactctggcggtatccgcaacgaaatcccggctggcgcggtgacgatgggggcggtaatcagtaccttcccgttccctaatgaactggtcacgatggatttaaccggtaaacaattgcgcagcctgatggagcatggcgctggcttaagcaacggcgtattgcaggtgtctaaagggctggagatgaagtatgacagcagcaaacctatcggccagcgggttaccgtgctgacgctcaatggcaagccgattgacgatgctacggtttatcacatcgctaccaacagcttccttgccgacggcggcgatggttttgcggcattcacggaaggccaggcgcggaacacctccggcggctactatgtgtcgaatgcgatagttgattactttaaggcgggcaacaccatcacggatgagcagctcaaaggaatgcgcgttgcggatgtgaagaagtaatttcccctgccgcggcgcgttcagtgtcgcggcgtgacatgaagaaaattcaactttgctgaatattcctcattctttggcgtgatttttcagttgacgtccttctgcttttccgtcatttttacatctggacgtctaaacggatagatgtttacaacacaacaaataataacatgcgattgatgaggtaaggtatgagcttttttcacgccaaccagcgggaagccctgaatcagagcctggcggaagtacagggtcagattaacgtttcgtttgaatttttcccgccgcgcaccagtgaaatggagcaaaccctgtggaactccatcgatcgcctgagcagtctgaaaccgaagtttgtttcggtaacgtatggcgccaactccggggaacgcgaccgcacccatagcgttattaaaggcatcaaagagcgtactgggcttgaggccgcgccgcaccttacctgtattgacgccacgcgcgatgaactgcgcaccatcgcccgcgactactggaataacggtatccgccacattgtcgctttgcgcggcgatttgccgccgggcagcggtaagccggagatgtacgccgccgatctggttggtttgctcaaagaggtggccgatttcgatatttcagtagcggcctatccggaggtacatccggaagcgaaaagcgcgcaggccgatctgcttaatctgaagcgtaaagtggatgctggcgctaaccgcgcgataacccaatttttcttcgatgtggaaagctacctgcgttttcgcgaccgctgtgtttctgccggtatcgacgtagaaattattcccggcattttaccggtgtctaactttaaacaggcaaaaaaatttgccgatatgaccaatgtccgcattccgtcctggatgtcactgatgtttgaggggctggataatgacgcagaaacccgcaagctggtgggcgctaacattgcgatggacatggtgaaaattttaagccgtgaaggagtgaaggatttccacttctacacgttgaatcgtgcggaaatgagttatgccatttgccacacgctgggcgtaagaccgggtttataacctccagctccctgccgggagctttattacaactcatattgatctacatctctgtaactaaaaatataaaaggtattagctatcgaatctgtggattaattcaactatatctatttgctcctggtgtatatcgtaacggtaacactttaaaagggagctgagatatgagcacgaccgacgatacccataacacgttatccactggaaaatgtcctttccatcagggggggcatgaccgaagcgcaggcgcagggactgccagccgcgactggtggccgaaccagcttcgcgtggatcttttgaatcaacattccaaccgttctaacccgctgggtgaagactttgactaccgcaaagagtttagcaagttagactactccgccctgaaaggggatctcaaggcgctgctgaccgattcacaaccgtggtggcccgctgactggggcagctatgtcggtttgtttattcgtatggcctggcatggcgctggcacctaccgttctattgatggtcgtggcggcgcgggtcgtggtcaacagcgttttgcgccgcttaactcctggccggataacgtcagcctggataaggcgcgtcgtttgttgtggccgattaagcagaaatatggccagaaaatttcctgggccgacctgtttattctggcgggtaacgtggcgctggaaaactccggcttccgtaccttcggtttcggcgccgggcgtgaagatgtctgggaaccggatctggatgtgaactggggcgatgaaaaagcctggttgactcaccgacaccctgaagcgctggcaaaagcgccgctgggcgcgaccgagatgggccttatctacgttaacccggaagggccggatcacagcggcgaaccactttctgccgccgccgctattcgcgctacctttggcaatatggggatgaacgacgaagagaccgtggcgttgatcgctggcgggcataccctcggtaaaacccacggcgcggcagcggcatcccatgtaggggccgatccggaagccgcgccgattgaagcgcagggcttaggttgggccagcagctatggtagtggcgttggcgcggatgctatcacctccgggctggaagtggtctggacgcagacgccgacccagtggagcaactatttcttcgagaacctgttcaaatatgagtgggtacaaacccgtagtccggctggcgctatccagtttgaagcggtagacgcgccggacatcatcccggacccgttcgatccgtcgaaaaaacgtaagccaaccatgctggtcaccgacctgacgctgcgttttgatccggagttcgagaagatttcccgtcgtttccttaacgatccgcaggcctttaatgaagcctttgctcgtgcctggttcaaactgacgcacagagatatgggaccaaaagcgcgttacatcggaccggaagtgccgaaagaagatctgatctggcaggacccgttgccgcaaccgctctatcagccaacgcaggaagacattatcaacctgaaagcggcgatcgctgcatccgggctttctattagcgagatggtttcggttgcctgggcatccgcgtctactttccgcggcggcgataagcgtggcggcgctaacggcgcgcgtctggcattagcgcctcagcgcgactgggatgtcaacgccgttgcggctcgcgttctgccggtattagaagagatccagaaaacgacgaataaagcctcgctggccgatattattgtgctggcgggcgtggtcggtatcgagcaggcggccgctgctgcgggtgtcagcatcagcgtaccttttgcgccgggccgggtggatgcgcgtcaggatcagaccgacatcgagatgttctcgctgcttgaaccgattgctgatggattccgtaactatcgtgcgcgtctggatgtgtcgacgaccgaatcgctgttgattgataaagcgcagcagttaacgttgaccgcgccggaaatgacggtactggttggcgggatgcgtgtgctgggaaccaactttgacggcagccagaacggtgtctttaccgacagaccgggcgtgctcagcactgacttcttcgctaatctgctggatatgcgttacgagtggaagcccaccgacgacgctaatgagctgttcgaaggccgggatcgtctgactggcgaggtaaaatacacggcgacccgcgccgatctggtgtttggttccaactccgtactgcgcgcgctggcggaagtttacgcgtgtagcgatgcgcacgagaagtttgtgaaggacttcgtcgcggcatgggtgaaagtgatgaacctggaccgtttcgatctgcaataatctgacaggttaattcgtcagcggctgctattcggtagtcgctgacgttttcctcgtttaatgcgaaaaataacgaaaatgccccgtgactttccagttaaataatacatcttcctcctgtgctcccgcgcctatgttatgcacaaccagcggcaccccttcaggcgtgacgttcagggataccacgccaatatgcgcaaggccgttatccagtcgccaggagacaatatctcccggttgataatcgctatatttatctgtcaccggcaaagctttgttttgacgctggaaccaggtttccagattcggaacgcggcgatggtcgatattgctgtccgggcgtttcagcttccagttattcgggtaggcagagaaatgcgcctgcatgtcttcatgtacccgtttctgtaaatcaacctgctgactgcgcagcgcgcggatgacgacatctgcacatacgccacgctccagcggaagatcgccattcggataatccagacgaacataggcagcatcataaaatagcgtcttacctatttgcgtcccggcactttgggcgattgcagcattagtttgcgcctgaacggttattggtctggtatcagagcgtggcgaatgatgagagatatggctaataaaaaaagcagcaagaataccgataagcgcctgtgcgaatttcatcttcttcgtccgtgaagtgtgtcagtacgtcatttgactttccgcggagagaatggtgcgtgataaaaaagtctatttcaggacaaaatggactgattccaggctatggaatacctgatgatggcgcttcgcttacccggcctggatgattggataacaaggccagataaggtgcctgtgtcgatattcggcaactgaattctgttgggtcagcaagctgaaatactcctgactatcgtcaggagtattgctcagaccttattcccattcctgcaagaagcgttgaccgtactggtcggcgaccagcagcgcggcgtacacttcatccggcgttgcgccgccaggcatgttatgaatagtttcaccttctgcgcaggaggcttccgcgacggtgcgcatcttggccggaatatcctgtttaatatccagttgcgccagcgtaatcggcaggccaacggaatggcacagcgccgcaacggtttcgatttcttcgaccggcgcgttttccagcaccagttgcgtcagcgtaccgaaagcgaccttctcaccgtgataatagtggtgcgcatccggaatcgccgttaaaccgttatgaatcgcgtgcgctgcggccagaccgccgctttcaaaaccgaccccgctcaggtaggtgttggcttcgatgacgcgttccagcgctggcgtgacgacgtgctgttcggcggccaacatggctttttcgccttcttcgatcagcgtgttatagcatagctccgccagcgccagcgcggcctgtgtacacttgccgcccgccattgtggtggcgccgctgcgtgagcaggcgcgcgcttcaaaccaggtcgccagtgcatcgccgataccggctgccagcagacgcgccggcgcgcccgccactatctgcgtatcgacaataaccatattcgggttatgcggcagcagcagataacggtcaaactcaccggcatcggtataaataaccgagagtgcgctgcacggtgcgtcggtagaggcgatggtcggcgcgatagcgaccgggacgttcataaagtgcgccagcgctttggcggtatccagcgttttaccgccgccgatacccagtacggcgccacactgacttttttcggcgacggcgcgcagcctgtcgatctcattttgcgaacattcgccgccaaacggggcgatttctactgacaaaccggcatccgtcaggcttttgcgcagcgtctcttcggcaaatcccagcacgaatttatcgcccacaaccagccagttgttcgccattggttttaaataatcgccaagacgcgcgatgacgtttgcaccctgaatatacttacctggtgactgaataatgcgatccatacatttctctcctacaggttcagattaccaaaagcgtttttccagtcttgctcaaacttctctattgccgactctaccgcaggcgtattgagcatttgttgcgctacatctaaaggaagggtaatcgcctggcaacctgccagtaagcaatccagcgcctgccgcggcgttttaaagctggccgccagtaccatgctgtcgggcgcgtgatgttccagtagcgtttgcagctcctgaaccatacgaatgccatcgccgccctgcgcatcaacgcggttgacgtagggagcgacatattttgcgcccgccagcgccgccagcaggccctgcgatgcgctgtagacggcggtgcccagcgtcacgatgccttcttttttcagcaatttaatcgctgcaagaccttcggcggtcaccggaattttaaccacaatgccggggatggcgttattcagtcgtttggcttcttccaccatccctttcgcgtcgcggctcatggtctgcgcaaataaagtgccttcttcgccgatggcgttttgcagcctgggcagcacatcccagatagattctttgctggctgccacaatgcttggattggtggtgacgccggcaatcgggaaaatgcgcgccagacgttcaacttccgccacgttagcggtatccagatagagttccatagtctttcctttacagttcaagttcatgttgcagcaggctggcgatagcgtcggcggaagcggcgttaaccagcgtgttgcggaattcttcgtgcatgatgcggcgggccaggcgcgagaaaatacgcatatgctggtcgcccgcggcgtgtttgttaagcgtcagcataatgatgaactgcgcctcgtcatctccccagcgtaccggcgcgttcaggcgcgccacgctgatggtggactgttcgatatgttccgatttgctgtgcggaatggcaaagctaaagcccagtccggtggagaataccgcctcgcgcgcccatagatcggcttccagtttgcgcgggtagcggcagcggcccgccagcagcagattgtcggtcatgcctttaatcacctcctctttgctgcgccagtcgctatcaagcgttatgcattgggcggtaaccagcggggcatcctgctgcgacatgcggaactgcgccagcagatgctccacctccagcgaggtgcggcaggccatcgcctgattcaacaactggcggcaggctcggctgtcgagttgtgccatccgcgctttggcggcgggaatcgacggcgcgcccatgctgatctcgtccagccccagacctaccagcaatggcagaaccgaacctttggcccccagttcgccgcacagaccaatccatttgccctgacgatgtaccgcctgcaccgcgaaatccaacgcgcgcaggaaggcgggattcaggctgttgtagtgacgagtgactttggcgttatcacggtctaccgccagcaggtattgtgttagatcgttactaccaatactaaagaaatcaatctcttcacagcattgatcgatgatgaacatcaccgacggcacttccagcataatgccgagtgggatcttctcatcgaacgggatatgttcattacgcagctgctgtttggcttccgccagcttctctttgacccacagaatctcttccatagaggagatcatcgggatcatgattttcaggttgccgtgggcggacgcgcggaggatcgagcgtagctgggtggtaaacagagaagcgtactcttcataaatacggacggcgcgatagccgaggaatgggttggcttcggcaggaatattcagataatcaacgggcttatcgccgcctatatccattgtgcgcacaataatgctgcgtccctttgcggactccagagcctggcaaaaaatattgtacagctcgttttcgtccggcgcgcaggcgcggtccatatacagcatttctgtgcggaacaggccaaccgcttccgcgccgttactaaaggccgcttgcgcctcgacggagtgcgcgatgttggcggcgacctccatgcggatgccgtcagcggtgcgcgcttcctgggtcagccagatgcgctgctgttcgcgcagggcgtcttgcacgcgggcttcctgctgatagtaacgagtgacaggctcgtcaggcgcaacgacaatcgcgcctgcgttgccgtcaatataaaccgtctgctgacgccacggtgttaaggcctcaatctccacgccaaccagggtgggaatgttgaatgagcgggcgagaatcaccgtgtgcgaagtggtgccgccgctttttaacagcagacctttgagaaaggttttatccagttcgaggaactggcttggcgtcaactcttccgccatacagatagatggccgggtcaactggcccggcgccggaaagcgctgcccaccgtaaatgtgttgcagtaactggaagcaaacgtcacgaacatccagcgcgcgttcctgtaaatagctgctgctggcgcgagcgaactcattgcagaaatggttcgcgctttccacgattgcctgcgcgcagcttaaaccgcgcagaacgccgtccagtaaatgctgacgcagtgaagcgtcgcctgccagtgaacgatgggcttccagaatcgcgctggcggcaccgtcactgtcgagctgacgaaactcaatatgctttatcaacatcgctaagccattgtccagcgcggcttgttccgtctctgtgtcgttggcggtcgggagttcgccgagcgcattgagatccagggaagagagtggcgtcagtacgccgcccgcgctgccgctacacacgctacgggcgcggtaaatctgcggattcagctgggtcaacgacgccggaagcggctccagttcgctgtttttaatctccgccagcggcgcgtcgcagagtgggaattcatcgcgcagccattgactcagacgctgacaggcaacctgttcatcggcaccggaaatcaccagctgacagtggtcgccagccagcgtgtcggtgccaatcagcgccagcgcgcttttggcgctgcctttgcgatcggtgcgcaggttgtgccactcaatttgcgacgtgaaggtattacacagcgtttctacgtggcttgccgggcgcgcatgtacgccattcggcagttcacaggtaaattccacaatcaggggcattgcctctctcccataacgattctctcgctacagcataaaaggaggtagccggaatacgccatgtgacaaatctgtcaaaagctggataaatgtaatgtagcgcaaaaagtgcgagttgtctcacaacttagcgtggtagcgcgggttttacctttttcagaagttatgaagcggatcgcatttttatactgatattacaaaaatccagtaaatggcctttttatccactgtctgcgcggcaatggattgcctattgttttccgcagtaactttatggacatgggctttatccagcccgggagcgacttatgaaagagttggtacagatcctgaaaaatacccgccagcacctgatgaccggtgtttcgcatatgatcccctttgtggtggctggcggaattttgctggcagtctccgtcatgctatatggcaagggcgccgtacccgatgccgccaccgatccgaatcttaaaaaactgtttgatatcggtgtcgccgggctgacgctgatggtgcctttcctcgccgcatacatcggttactccattgccgaacgctccgcgctggctccttgcgcaattggtgcctgggtgggtaacagcttcggcgcgggttttttcggggcacttatcgccggacttatcggcgggatcgtggtgcattacttgaagaaaatcccggtgcataaggtgctgcgttctgtgatgcctatttttgtgattcccatcgttggcacttttatcaccgcgggcatcatgatgtgggggctgggcgaaccgatcggtgcgctgacaagcagcctgacccaatggctgcaagggatgcagcagggcagcatcgtgctgctggcggtgatcatggggctgatgctggcttttgatatgggcggcccggttaacaaagtcgcttatgcgttcatgctgatttgcgtggcgcagggcgtatataccgtggtggctatcgccgcggtgagcatctgcgtaccgccactgggactggggctggcgacgctgattggccgcaagaatttttctgttgaagagcgcgaagccggtaaagccgcgctggtcatgggctgcgtgggcgtaacggaaggggcgattcctttcgccgctgccgatccgctgcgcgtgatcccatccattatggtgggctccgcttgcggtgcggtaatggccgcgctgtttggcgcgcagtgttatgccggttggggcggtttaattgttctgccagtcgtggaaggcaagctgggttatgtcgcggcagtcgccgtgggcgcggtggtaacggcagtctgcgttaacgtgctgaaaagcctgacgcgtaagaatgtgtcgcaagttgacgaaaaagaagacgacctggatttagattttgagatgaattaagcgaggaataagccatgactaaaattattgcagtaaccgcgtgtccttctggtgttgcgcatacctatatggcggctgaagcgctggaaagcgcagccaaagcgaaaggttgggatgtaaaagtggagactcagggctcgattgggctggaaaatgaactgacggcagaggatgtggcgagcgccgatatggtgattttgactaaagatatcggcatcaagttcgaagagcggtttgcgggtaaaactatcgttcgcgtcaatatcagcgacgcggtaaaacgcgccgacgccattatgaacaagattgacgcccatctttcgcaaaccgcgtaacgttaaaatgcccgatggcgcaagtttatcgggcctgctcacaggcccgataagagatttatgccgccatccggcgctcgtgtccacaggagctcctcatgacccatcgtattcaacgcctcaaagccgctctgtttcagaatcaccgtgaaatttctctggagcgcgcgctgctttataccgccagccatcagcagacggagggcgaaccggtcattttgcgccgcgccaaagcgacggcgtatatccttgaacatgttgaaatttcgattcgtgacgaggagctgattgccggaaaccgaaccgttaagccgcgcgcgggtattatgtcgccggaaatggacccgtattggctgcttaacgagctggatcggttcccgacgcgtccgcaggaccgttttgatatcagcgaagaggataagcgcctctatcgtgaggttctattcccgtactgggaaaaacggtcgatgaaagattttattaacgggcagatgaccgatgaggtgaaagccgccgtcagcacccagatttttagcattaaccagacggataaagggcaggggcatatcattattgattatccacgcttgctcaataacgggctgggtgaactggcggcgcagatgcgcgcgcgctgcgagcaacagccggaaaacgacttttatcaggccgctctgttgttacttgaggcatcgcaacgccacatcctgcgttatgccgtactggcggaacagcaggcggagcgctgcccggacgctcgtcgtcgtcaggaactgctcaccattgccgccaattcgcggcataacgcgcagcacaaaccacagacgttctggcaagcatgtcagctgttctggtacatgaacattattttgcagtacgagtccaacgccagttcgctgtcgctcgggcgcttcgaccagtacatgctgccgttttatcagacttcgctcactcagggcgacgatccggcgttcctgaaagagttgctcgagtcgctgtgggtgaaatgcaacgatatcgtgctgctgcgttccaccagtagcgcgcgctattttgccggtttcccgacgggttacaccgcgctgctgggcggattgacggaaagcggacgcagcgcggtaaacgtgctctcttttctctgcctggatgcctaccagagcgtgcagttgccgcagccgaatctcggcgtgcgcactaacgcgctgattgatacgccgttcctgctcaagaccgccgagaccattcgcctcggtaccggcattccacagattttcaatgacgaagtggtggttcccgcgttccttaaccgtggcgtgtcgttggaggatgcgcgcgattatgcggtggtgggatgtgttgagctgtcgattccgggcagaacctacgggctgcatgacatcgccatgtttaatctgctgaaagtgatggaaatcagcttgtatgaaaatgagggcaacgacactcttacttatgaggcgttgctggcgcatattcgcgccaaaatcagtcactacattacactaatggtagaaggcagcaatatttgcgatatcggccatcgtgactgggcgccggtgccgctgctctcttcgtttatcagcgactgcctggagaaagggcgagacatcaccgacggcggcgcgcgctataacttttcgggcgtacagggcatcggtatcgccaacctgagtgattcccttcatgcgctcaatgggctggtattcgatcagcagcgcctgagttttgatgcgctgctgtcgatcctgaaaaacaacttcgccacgccagaaggggaaaagatccgcgccaggcttatcaaccgcttcgaaaaatatggcaacgacattgataatgtcgataacatcagcgccgaactgctgcggtattactgcaaagaggtggaaaaataccagaatccgcgcggcggccagtttacgccgggttcatacacggtttccgcgcatgtgccgctgggagcggtggtcggcgcgacaccggacgggcgttttgccggagaacagctggcggatggcggcctgtcgccgatgctcggacaggatatgcaagggccgacggcggtactaaaatcagtaagtaagttggataacacgctgctgtcgaacggtacgttgctgaacgtgaagtttactcctgcgactctggaaggagaggcgggactgcgcaagctggcggatttcctgcgcgcgtttacccagctcaaactgcagcacatccagtttaatgtggtgaatgccgacacattgcgcgaagcgcagctacggcctcaggatttcgctgggctggtggtgcgcgtggcgggctacagcgccttctttgtcgagctgtcgaaggagattcaggatgacattattcgccgcaccgcgcatcagttgtgaggttgtgggggcgcgcgatgaggagaccgcgcgtatcttcaatatccagcgctattcgctgaatgacgggcaggggattcgtacggtggtcttttttaagggctgtccgcatacctgtccgtggtgcgctaatccggaatctatctcgccgcgcattgaaacggtgcgccgggaaaataaatgcctgcgttgcacgccgtgtctgcgggatgccgacgaatgtccttccggcgcgtttgagcgtattgggcgtgatattacgctggatgaactggaacgcgaagtgctgaaagacgacatcttctttcgtacttccggcggcggggtgacgctttctggcggcgaagtgctgatgcaggcgccgttcgccacgcgcttcttacagcgattgcggcgttggggcgttccttgtgctattgaaacggctggcgatacgtcggccagccgtctactgccgttggcaagggcgtgtgatgaggtattgtttgatctgaaaattatggatgcggagcgggcgcgcgaggtgatcaacatgaatctgccgcgcgtactggagaatttacggttactggttagcgagggaatcacggtgatccctcgtttgccgttgattcctggctttacgcttaacgcagagaatctgcagtgcgcgttaacattgttgagatcattaggaataaagcaggttcacctgctaccgtttcatcagtacggcgagccgaaataccggctgcttggaaaatcatggatgatgaaagatattcccgcgccgtcggtgcaagagatcgctctgtttcgggagatggcggagcaagcaggatttcaggtcaccacaggaggttaatatggcagtacctgtacggcatctggtggcagtgaccgcctgcgtgagcggtgtagcgcatacctatatggctgctgaacggctggaaaaactttgccagcaggagaagtggagcatcaagattgaaacccagggggcactcggtacagagaaccgcttaacggaagaggatatccgccgtgccgatgtcgtgttgctcattaccgatatcgagctggcgggcgtggagcgatttacccggagtcgctatgtccagtcggggatcagcgcttttttgcgggagccacagcgggtaatgagcgctgtgcgtaaactcctttccgcgccgcaacatacccaccttatcctggagtaatctgcttttccgttagctggctgtgatactggcggcgatactccgacggcgagcgttccgtatttttgcgaaacaggcggcagaaatagttactgtcgacaaagccgcagcggtgcgccacctctttcactttcaggtcataacccttcagcaacgttttggcgtgttccagtcgcgtatggttcaggtattcgttaaagccgatggcccccgttttctggaacaggtgcgagaggtaatttggcgagatataaaacgcctgtgctaccgattcgcgcgtcaacggcgcggcgtagcgttcatcaatatactcccgaatggcttcaaaaagcgcgcggctgcgggaggcggtctggatttggctgccgagcagatcgcggcaatggcttagtaggctggcgacaatcaatctggccgtttgctgctcttgcggctgcatctgcatctcattaagcgtttgtaacaggaacgagccgatacgcgggccgcggcgcgcaacgtgctgtttcgtgaggttttgatgctgctgaccatcccagtggactacgctgaaacctaactgctgtttgccaaacagaatgctcagggtggtgacgggcgtttgccattgcgggatgttccagccgccagccggaacgtagagaacatcgcaaggaatgagcggggcggtaatgctcatgtcagtaagctcgccctccagcacaatctccagccgcggaaaatccacctggtacgccagttccggcgctgggccgctggcgctggcaaaataaatctggcgcagcggcagcgggccgttgatgagacgggagagaaggtggctgacgtcgtgatacatgataatcccctgccgatcgcaaacagaggaaacagtaacgtcgaaaaccgatgtcctcaagcgattattgccggatagcggcgctttgcgccttatccggactacgggagagaagcacgccaggcccgataagcgttagcgttatcgggcaacatacaggctattgattaccgacctgatcgccatacggcaacgtatcataatcaatcagcgcgtttttcttatacgggttgccaatccagcgcgtggtctctttgaactgcgggttggtgatggaacgcgtcgggtcgtagccatcataggtcaggcccgctaagtccgaccaggtatggataagctcggaactgctgtacttacgatcgacatcctgtgagaagtcgcgcggatgcgctgcctgccatttctctgaggtccacagcaggaacggcaccgtatacatatgacgggttggcgaatcttcgtttcgtccctgcgtcttatgcggcggcgtgtcatacacttcttcaccgtgatcggagaagtagagcaggaaaccgttcggatcggtcgctttatagtccttaatcaggctggcgacaacatagtcgttatacaggttcgcgttgtcgtaatcattatacgattccagctcgtcactgcttaatcccggcggaacatggtcggttttaccatcaaacttgccctggttttctggatagcggaacttgtatttaatatgcgttcccagcagatgcacaataatgaattttttcggcgccgggtcggctaacaccgctttaaacggcgccagcacgttgctgtcatattcgcgcgcgctttgagtgcgctgctggttcatatagaactgcttatcagtctgcttggagaacacggtcagcatggtattacgcgccgtcatcgtctgctggttagtgatccagaaggttttatacccggcctgtttcatcatattcatcagcgatggcttcgtcagataccagtccgggttcttttcgtccgcgaacgttagcgcctgttgcaggatctcaatggtgtacggtcgcgaagttaccacgttattaaacacggtcagcccggggtcggttttatgcagcgcgtccagttccggcgtggtttcgcgcggataaccgtacagactcatacggccacgctgggtcgattcgccaatcaccagtaccagcgtgcgcggcgcatcgccggagtggtcctggaagttagccagcggcggcagggcatcgttttcattcagcagtttattcagcgaggcgagctgtaaacggtactgatagtagccagtaataaattgccacggcgcggcgggttccattcgtgatgccaggctatccagcgttttctccatcgacttatgcttgataaaggtattcatcgcgatgggatggaggatcagcccgtacagcagggcaaacgacaccagataacgccagggggatggaatataaaccgggcgcagacgtgtccacagcaaaatcgccgccaccgtataagccagcgcgacaagaacaattttcagactgaaatattggcttaaatattcgctggcttcattggcgttggtttcaaacatcacaaacagcacgctttgcgagaactcctgcccgtagattacgtaatagctcagcgccgccagcgaggcggcccagagtacgacgccaataacggcagcaataacccggatgcggcctggaaacagaaagaccgggatcagccacagtgagctgtacagtagcgaatcccgcagaccgtttgtcccgctgtatccggtgagataaataatggcctgcaggagggtggaaaagaaccaaaagtagagcagtgcccagcccagggctttccagctaaacgcgggtttagtctggagtaatgtggattgcataatgagagcctgtctttaatcgtagcgccaaacgtaacgcctgaaccttaaaagaatctgaagcaaacctgctttatgccgcacgttttgctaagaaagatttacaaatgcataaaatgcagacagaaatatattgaaaaaatgacgaggatgacagcagtatttcatgccgcccccacataactgcgtgagagcggctctcttttggcgttagccggtgttgcgcataccggcagcgacgcccgcaatcgtgaccatcaacgcctgttcgacgcgaggatcgggcgatttgccctgctcttcagtcagacgggaacgatacagcaattcggcctgcaacacgtttaatggatcggtataaacgtttcttaactgaatggactccgcaatccacggtaagtcggccatcaggtgcgaatcgttggcaatcgccagcaccactttaatgtcttcttccagtaggtctcgtagctctttgcccagcggccaaagcgttttcgccaccaggcgctgatcgtaatagtcggccagccacaggtcggctttcgagaacaccatttccagcatcccaagacgcgtggagaagaacggccagtcgcggcacatggcttccagttcgctttgtttaccgtcttccaccactttttgcagcgcagtacccgcgcccagccaggctggcagcatcaggcggttttgcgtccaggcgaagatccacggaatcgcgcgcagcgattcgacgccgccagttggacgacgtttcgccggacgtgagccgagcggcaatttgcccaactcttgctccggcgtcgcggagcggaagtacggtacaaagtctttattttcgcgcacgtagccgcggtaggtttcacaggagatgacggaaagctcatccataatatgacgccagctgtctttcggttccggcggcggcagcaggtttgcttccagaattgcgctggtgtagagcgagaggctgctgacggtgacttccggcaggccgtatttgaagcggatcatctcgccctgctcggtcacgcgcagaccgcctttcagactgcctggcggttgcgaaagcagcgccgcgtgggctggcgcgccgccacggccaatagatccgccgcggccgtggaagagggtaagctcgatgccggctttttcacaggttttgatcagggcgtcctgcgcctgatactgcgcccatgacgcggccataacgccggcgtctttcgccgagtcggagtagccgatcatgaccatctgcttaccctgaatcagtccgcgataccagtcgatattcaacaactgggtcatcacgtcgtcggcattgttcaggtcatcgagggtttcaaacagcggcgcgaccggcatggcaaagccgatacctgcctctttcagcagcagatgcacagccagcacatcagacggcgttttcgccattgaaattacgtaggcggcgatcgatccttttggcgcttcggcaataaccttgcaggtttcaagcacttcgcgggtatcgttgctcggctcccagttacgcggcagcagcggacgtttggagttcagttcgcggatcaggaaggcctgcttgtcggcttccgaccagctttcgtagtcgccaataccgaggtagcgggtaatttcgcccagcgcttcagtatggcgggtactttcctggcggatatcaatacgcaccagcggtacgccgaaacacttcacgcggcggagcgtgtcgagtaactcgccgttggcgataatgcccatgccgcaggcctgtaacgactggtagcaggcgtacagaggttcccagagctgctcgttttgcgtcagcaggccagccggtttgggcagcttctcgcctttcagacgcgcttccagccaggactgggtcgccatcagacgggcgcgcaattttttcatcaggtagcgatacggctcagacgcgccttcttcgcccactaacgccagcagctccggcgtggcgtcgaccatcgacagttctgataccagaacatgaatgtctttcaggaacagatcggtggctttccagcggcttaacaagagtacgtggcgggtgatatccgccgtcacgttcgggttgccgtcacggtcgccgcccatccaggaggtaaaacgtaccggcacaaaatccaccggcaatttgtagccgagattttcttccagctgttcgttcagttcacgcagatagttaggtacgccctgccacaggctgttctcaaccacggcgaagccccatttggcttcatccaccgggcttggacgctgcttgcggatctcatccgtatgccaggattgggcaatcaactggcgcaggcgacgcattacctggtggcgttcgtagtcggcgatatcggtattatcaagctgttttagacagttgttgatttcacccattttgtgaataagcgtacggcgggtaatttctgtcggatgggcggttagcaccaactccagagacagcgactctaccgcttttttgatggttgcgtcgttgaggtccggttggtttttcagtttgcgcagagtgcgggcaatcacttccgggttgctggcggcttcgccttttggcgaaatgctgtggtattgctcggcagtattggccaggttcaggaactgactaaacgcgcgcgcaactggcagcagctcgtcattagacaaattttgtagcgtggtgagcagctcctggcgattagcttcattgccggcgcgtgaagatttggatagcttacggattgtttctacgcgatcaagaatgtgttctcccagcgcatccttgatggtttctcccagcaccttgccgagcatactgacattactacgcaacgcggaatattgttcgttcatatgaccccagacaccccatctttaatgtaattgccctgtctctttcatgccacagcggcagtggctgcgctcgcccgtatgccagttctgcggaatgggctcgtttgccgccttgctgtgacgtgaaatttttcggactttgctttttagccgtcttttataaagccacgtaaaacccgtggcgtcaattactgcgaaatcggttcagcaaacgaagaaatgacggtaatttattaaagttaattcgcatcgtgccaaataagaaatgcttatgaacatgtggcgtagagacgccggatggcgctgcgcttatccggcctacaagacggggtaggcccggtaaacatcacgtcaccgggcaatatgcattaatgccagcaaaaatggtgtactacctgggtaatcaattcccgggttggcttaataaaacgcgtttcgagatattcatccggctgatgcgcctgattaattgagcccggaccaagcaccagcgttgggcataatgtctgcataaacggcgcttcagtacagtagttcaccacgtcggttttcgttcccaacagtttttctactacttcaaccagttggtggtccggtggacactcataacctggaatcggcggatgtaattccgccaccgtcaggcggcccggccagcgttcgcttaccggggccagcgcgtcgttaagcagtccattaaggtcgtttaacgtcatgcccggcagtggacgaatatccatatgcaattcgcagcaggcgcagatacggtttgaggcatcgccgccgtgaatatggcccagattcagcgttggatacggaacggtaaacgcctcgtagtgataccgcgctttcagcgagtcacgcagttgcatgatatggccaatcgcatcgtgcatcagttcaatggcgttaaccccacgcgccgggtcgctggaatgaccggactgccccaggacgcgaacgacattagagatatgccctttgtgcgcgcgtatcggttgcaacgacgtcggttcgccaatgatcgcgcagtccggacgtaatgccgtggttttggaaaaataacgcgcccccgccatgctggtctcttcatcggcggtcgccagaatgtagagcggctttttcaactttgtgacgtcaacgtcacgtagcgcgtccagaataaaagcgaagaagcctttcatatccgcagtgcccagaccatagagcttattgtcgtgctcggtcagcgtgaacgggtcgcgcgtccagcgtccgtcatcaaagggaaccgtgtcggtatggccggtcagcagcaaaccgcccgcgccatgtccggtgctggcgagcatattaaatttgtttcgcgttcctggaaccggttgaacctctacgttgaaaccaagatcgctgaaccagcctgcaagcaaagtgattaaagacgcattactttgatccagggattcttcggttgcgcttatcgacggtgtggcaatcaaagcgcggtaaatctcgataaatggcggtaaaacgtttttcattgttgacacacctcaggtcatgatagtatcaatattcatgcattaattatgaataaaaatacattaacgttgagcataaaggaacccgatgttgaatacgctgattgtaggcgctagcggttatgcgggcgcagagcttgtaagctacgtaaatcgccacccacatatgaccataaccgctttgaccgtctcagcgcaaagcaatgatgcaggaaagttaatttctgatttacatccgcagttaaaagggattgtcgacctgccattgcaaccgatgtcggatgtacgtgactttagcgcagatgttgatgtggtgttcctggcgacagcgcatgaagtgagccacgatctggcgccgcaatttttacaggccggatgcgtcgtattcgatctttccggcgcgtttcgggtaaacgatcgcgccttctatgaaaagtattacggatttactcatcagtatcctgagctgctggagcaggcggtgtacggtctggcggagtggaatgtcgataaactgaacacggcgaatctgattgcggttcctggttgctatccaaccgcagcgcagttgtcgctaaaaccgctgattgacggcgggcttctcgatctgacgcagtggccggtaattaatgccaccagcggggtgagcggcgcggggcgcaaggcggcaatatcgaacagtttctgtgaagtgagtttgcaaccgtatggcgtgtttacgcatcgtcatcagccggaaatcgccgtccatctgggcgcggaggtcatcttcaccccgcatctggggaatttcccgcgcgggattctggaaaccattacctgccgcctgaaagcgggagtaacccatgcgcaggtcgccgacgtgttgcaaaaagcctatggcgacaaaccgctggtgcgcctgtatgacaaaggcgttccggcgttaaagaacgtcgtcgggctgccgttctgcgatattggttttgccgtccagggcgaacatctgattgtggtggcaaccgaagacaacttgttgaaaggcgcagcggcgcaggcggtgcagtgcgctaatattcgttttggcttcgctgaaacgcagtctcttatttaagggtgaaatgatgaatccattaattatcaagctgggtggcgtattactggatagcgaagaggctctggaacgtctttttaccgcgctggtcaactatcgtgagtcccatcagcgtccgctggtgattgttcacggcggcggttgcgtggtggatgagctgatgaaagggcttaatttgccagtgaaaaagaaagacggcctgcgcgtgacgcctgccgatcagattggcatcattaccggcgcgctggcgggaaccgctaacaaaactctgctggcctgggcgaagaaacaccatatcgcctctgttggtctgtttctgggcgatggcgacagcgtaaacgtgactcaactcgatgaagcgttaggccacgtcgggctggcgcagccggggtcgccgaagctgattaacatgctgctggaaaacggctttctgccggtggtcagctccattggcgtaacagacgacggtcaactgatgaacgtcaacgccgatcaggcggcaaccgcgctggcggcgacgctgggggccgatctgatcctgctttccgacgtgagcggtattctggacggcaaaggccagcgtatcgccgaaatgacggcgtccaaagccgagcagcttatcgaccagggcattattaccgacgggatgattgtgaaagtgaatgcggctctcgatgctgcgcgggcgctggggcgcccggtggatatcgcttcctggcgtcatgcggagcaactgccggcgctgtttaacggcacgccgattggcacgcgtattctggcttaactatttgttcgcccgatggcggctgcgtcttatcgggcctatgtgaacagaaattgtaggccggataagcgtagcgccatccggcagtgaaattcgaagaatttaaggaagtctattatggcactttggggtgggcgttttacacaggcggcagaccagcggtttaaacaattcaatgattcgttgcgcttcgattaccgtctggcggagcaggatattgtcggttctgtggcctggtccaaagcattggtcacggtaggcgtactgactgccgatgagcaacgacagttggaagaagcgctgaacgtgctgctggaagaggttcgcgcgaatccgcagcaaatcctgcaaagcgatgcggaagatatccatagctgggtggaaggtaagctcatcgacaaagtgggtcagttgggtaaaaagctgcacaccgggcgcagccgtaacgatcaagtggcgacggacctgaaactgtggtgcaaagagacggtgagggaactgcttaccgctaaccgccagttacagagcgcgctggtggaaaccgcgcaggcgaaccaggacgcggtaatgccgggatatacccatctgcaacgcgcgcaaccagtgactttcgcccactggtgtctcgcgtatgtcgaaatgctggcgcgcgatgaaagccgcctgcaggacacgcttaaacgtctggacgtgagtccgctaggctgcggcgcgttggcgggaacggcctatgaaattgaccgtgaacaattggcaggctggctgggctttacctctgcgacccgcaacagcctggacagcgtgtccgatcgtgaccacgtactggaactgctttctgatgcggctatcggcatggtgcatctgtcacgcttcgcggaagatctgattttctttaattctggtgaagcgggctttgtagagctttctgaccgcgtgacttccggttcatcgttaatgccgcagaagaaaaacccggacgcgctggagctgattcgcggtaagtgcggtcgcgtacaaggggcgctaaccggcatgatgatgactttaaaaggtctgccgctggcgtataacaaagatatgcaggaagacaaagaagggctgttcgatgcgctcgatacctggcttgactgcctgcatatggcggcgttggtgctggacggtattcaggtgaaacgcccacgttgtcaggacgcggcgcaacaggggtatgccaacgccacggagctggcggattacctggtcgcgaaaggcgtgccgttccgcgaagcgcaccatattgttggcgaagcggtggtagaagctattcgccagggtaagccgctggaagcgttgccgctggccgatttacagaaattcagccgcgtgattggcgacgatgtgtatccgatattgtctttgcagtcgtgtctggataaacgggcggcaaaaggcggcgtttctccgctgcaggtggcgcaggccatcaacgatgcgaaggcgcgcctcgcgttgtaagccttataagcatagcgccatcaggcaatactgcccggccgagcatcagcgacgccgggtttttttacgcaaaaaaaaagcggaccagaggtccgcaaaagttcacgttggctttagttatttcgggttcgagagataccctctgaacgggcggtgtcttcaagggttaaacgagaaaccgctccgttctgtgatgtattattaatcagaaaggttgatagggataatcgttcattgctatgctacctatcgccatgaactatcgtggcgacggaggatgaataatgaatattcgtgatcttgaatatctggtggcgttagccgaacatcgccatttccggcgagcggcggactcctgtcacgtcagccagccaacccttagcgggcaaatacgtaagctggaagatgagctgggcgttatgctgctggagcgtacgagccgtaaggtgctgtttacccaggcgggcttactgctggtggatcaggcgcgtaccgtactgcgtgaggtcaaggtgctcaaggagatggcaagccaacaaggcgagacgatgtccggcccgctgcatattggtttaatcccaacaattggtccctatttgctgccgcttatcattccaatgttgcaccagactttcccgaagctggaaatgtatctgcatgaggcgcaaacgcatcagttgttagcgcaactcgatagcggcaagcttgactgcgctattctggcgctggtgaaagagagcgaggcgtttatcgaagtgccgctgtttgatgagcccatgatgctggctatttatgaggatcatccgtgggcgaatcgcgatcgcgtgccgatgtccgatctggcgggcgagaaattgctgatgctggaagatggccactgtctgcgcgatcaggcgatggggttctgttttgaagcgggagcggatgaagatacccatttccgggcgaccagtctggaaacgctgcgcaacatggtggcggcgggcagtggtattacactactccccgcgctggccgtaccgcaggagcgtaagcgcgacggcgtggtttatctgccatgcattaagccggagccgcgtcgtaccgtggggctggtttatcgcccgggatcgccgctgcgtagccgttatgagcaactggcagaggccatccgtggcgcaatggatggccatttcgacaaggcgttaaaacaggcggtttaagccgttcaacgccgcaacccgataagcttccgccatggttgggtagttaaaggtggtgttaacgaagtattcgatggtgttaccgccacctttctgctccatgatcgcctggccgatatgaataatttcggcggcgcgttcgccaaagcagtgaatccccagaatttctttggtttcgcggtggaagagaatttttagcgtgccgacgttcatgccgacgatttgcgctcgcgccagatgcttaaattgcgcgcggcccacttcgtaaggcactttcattgccgttaactgctgctcggttttgccgacagaactgatttccggaatggtataaatcccggtggggatatcttcgatgagatgcgcggtcgcttcgcctttcaccagcgcctgcgctgcaatacgcccctgatcgtaggcggcggaggccagactgggatagccaatcacgtcgcccaccgcatagacgtgcggcagggcggtctggtacatactgttgactttgagctgtccacggctgtctgtttccagaccaatattctccagcgccagcgaatcggtgttaccggtacggccattagcatagagcaggcagtcagccttcagttttttgccggatttcaggtgcatgatgacgccatcatcgcagccttcgattttctcatactcttcattgtggcgaataaccacgccgctattccagaaatggtaagagagagagtcggacatctcctgatcgagaaaggccagcaggcgatcgcgggtgttgatcagatccactttcacatccataccgcggaagatggacgcatattcgcagccgataacgccggcgccgtaaataataacgtggcgcggttcatggtggagactcaggattgagtcgctgtcataaatgcgcggatgcgagaaatccacatcattgggatggtaaggacgcgaaccacaggcaataacaaatttttctgccgtcagggtttcaaccgtgccgtcatggcattccagcgccagggtatgttcgtcaataaaatgggcgttgccctgcaatatttcacagtggttacgctcataaaacccctgacgcatacgcgtttgttgattaatcacgttatcggcatgattaaggatgtcggcgaaagaagaacgaaggagacgggagtggtcgctatagagcgggttttgattaaattcaataatgcggctgacggcgtggcgaagggctttggatgggatggtgccccagtgggtacatccgccgccaacgttatgataacgctcaatcaccgcgacgcgtgctccttgcttaaccagacccattgcagcgccttcaccgccggggcctgaccctatgacgactgcatcataatcccaggaatgtggcatggtattactcacctgtttttatacataaaataaacacgatgataacatttgcccagctttaacccaattatcgttgtgcttttttgcgaagccggagcacaaactgtctgtaaacaatcattcacaatccagtgtgaacccgttacttttattctctggtatagtgccgaataaggcatatggaaggattcagacattgtgatgggtgttagagcgcaacaaaaagaaaaaacccggcgttcgctggtggaagccgcattcagccaactgagcgctgagcggagttttgccagcctgagtttgcgtgaggtggcgcgtgaagcgggcattgcgccaacgtcgttttaccgtcattttcgcgatgtcgatgaactcggtctgacgatggtggatgaaagcggtctgatgctgcgtcagttgatgcgtcaggcgcgacagcgtatcgcgaaaggcggcagcgtcattcgcacgtcggtctccacatttatggagtttatcggcaacaaccccaacgccttccgtctgttattgcgcgaacgttccggcacttcagcggcgtttcgtgccgccgtcgcacgggagattcagcactttattgcggaacttgccgactatctggaactcgaaaaccatatgccgcgcgcgtttactgaagcccaggccgaagcgatggtaactattgtctttagcgcgggcgcagaggcgttggacatcggcgctgaacagcgtcggcaattagaagagcggctggtattgcaactgcgcatgattgcgaaaggggcgtattactggtatcgccgtgagcaagagaaaatagcacatcattccgaataacgtgaaggacgagtaatgaaacagtcaggtcaagataaaggtacgctgttgctggcgctcatcgctggcttatcgattaacggcacattcgcggcgctgtttagcgctattgtgccgttctccgtattcccgattatctcgctggtgctgacggtatattgcctgcatcagcgctaccaaaatcgtactatgccggtaggtttgccggggttggccgccgcttgtttcattcttggcgttttactgtatagcaccgtcgtgcgtgcagaatatccggatattggctctaatttcttcccggcggtgctgtcggtgattctggtattctggattggctttaaactgcgtaaccgcaagcaggacaccgcggaatagtgtgcgaatgccggatggcggtataaccggccatccgacgtacattttaccttgcggtgagtaataccccgcattccatatgatgtgtatacgggaactgatcgaatagcgccaggcgagacaccgtgtgcgtctggcttaacgtttccaggtttttgcacaacgtttccggattgcaggaaatgtacagaatacgtggataagcctgcaccattttttccgtttcgctgtccagaccgctgcgcggcggatcgacaaaaatggtttcgcactgatagcgcttcaggtcgatcccctgcaggcggttaaactcacgaacgccattcatcgcctgggtaaactcttccgccgccatgcgaataatttgcacattatcaatatgattagcggcaatattgtactgtgcggcagcgacggacggtttggcgatttcggttgccagcacgcggttaaaattgcgcgccagcgctaaagaaaaattgccgttgccgcaatacaactcaagcagatcgccttttgagtctttcgtcacctccagcgcccactctaacatctgaatattcatggcggcgtttggctgcgtaaagctgttttcgacctggcggtagatcatctctttacctgccacaggcagacgctcatcaatataatcctgatccaattcgattttagttttagtggcccggccaatcaggtgtacgttcagaccttgcgcgcgtaaagcatcgcgtaacgcagtggcggcttcacgccactcttcgtccagcttcttatggtacagcaacgacactaccgcctggttgctcaaggtcgtgagataatcgatctggaacagcttatgccgcagtgcatgattatcgcgcacgccggcaatcatcgccttcattaaggtattaatcagttggctggccgccgggaaggtgtcaacgcgaatccggcttttggtctgctgatcaaacataatgtggtacaggtcatcgccgtcatgccacaggcgaaattccgcacgcatacgatagtgactgaccggcgagcgaaatacttccggaaccaggccagaaaacggcgccatcatactctgcaagcgcgccactttttcggccagctgcgcctcatactgttctgtcggaagatgttcgggggtcatatcgcatcctgaataataaaagtacgcggggattgtagggattgctcagtggatgtccagctattgatgatttctgatttgtgatgcgcggtctggacagggtgttgtgacagacggtagcatccgtgggccggtcctgtgagttaatagggaatccagtgaaaatctggagctgacgcgcagcggtaaggaaaggtgagatgagagcgtaagcagacactgcctccggcgggaagtcatcatttctgctatccagccaacggataaccctccaagcccgaagacctgccggctaacgtcgcatctggtttttcatcatcgcgtactatcgatgaagcctgcggcatccttcttatattgtggatgctttacaatgattaaaaaagctacgctgctgacggcgttctccgtcacggccttttccgcttgggcgcaggacactagcccggataccctggttgtcaccgccaaccgttttcagcagccgcgcagcgcggttctggcgcccgttaccatcgtgacgcgtcaggatattgaacgctggcaatcgacctccgtaaatgatgttctgcgccgtttgcctggcgtcgatattgcgcagagcggcggcgccggacaaaactcctccattttcattcgcggcaccaactccagccatgtactggtattgattgacggcgtgcgtctgaatttagcaggcgtgagcgggtccgccgatctcagccagttcccggtgtcgctggtacagcgcattgaatatattcgcggtccgcgctccgctatttatggttccgatgctatcggcggcgtagtgaatatcattacgacgcgcgataacccaggcacagaattaaccgctggatggggaagcaatagctaccagaattacgacatctcgacgcaacagcaacttggcgaaaacacgcgggcgacgttgatcggcgattacgaatacaccaaagggtttgacgtggtagcgaaaggcggtaccgggatgcaggcgcagcctgaccgggacggctttttgagtaaaacgctttatggcgcgttagagcataccttttctgatcgctggagcggattcgtgcgtggttatggctacgataaccgtaccgattacgacgcctattactcgccgggctcgccgctgattgatacacgcaaactttatagccaaagctgggacgccgggctgcactttaatggcgaacgtattcagtctcagctggtttcaagctatagccacagtaaagattacaactatgatccgcactatggccggtatgatacctccgccacgctggatgagatgaaacagtacaatgttcaatggaccaacagtgtggtcgtggggcacggtaatgttggggcgggcgtagactggcagaaacagactaccacgccaggtaccggctatgtgcccgagggatatgaccagcgtaataccggggtttacctgacaggattacaacagttgggtgacttcactctggaagcggcggcgcgcagtgatgacaactcccagtttggtcgtcatggtacatggcaaaccagcgcgggatgggagtttatagaaggttatcgctttattgcctcctacggaacctcctacaaagcgcctaatttgggccaactgtatggttattacggtaatccgaacctgaatcctgaaaagagtaaacagtgggaaggcgcatttgaagggctaaccgctggcgtcagctggcgtatttcaggttatcgtaacgatattaatgacatgatcgattatgacgatcatctgcaaaaatattacaacgaaggtaaggcgcgcattaaaggtattgaggcgacggcgaatttcgataccggaccgttaacgcatacggtcagttatgattacgttgatgcgcgtaatgcgattaccgatacgccattaccccggcgttccaaacagatggcaaaatatcaacttgactgggacgtttacgattttgactgggggatgacatatcaataccttggttcccgctatgattcggattactccgcttacccataccggacagtaaaaatgggcggcgtcagtttatgggatcttacggttgcatatccggtcacctcacatctgacagttcgtggtaaaatagccaacctgttcgacaaagattacgagacagtttatggctaccaaactgcaggacgagaatacaccttgtctggcagctacaccttctgaaccacgtcccaccgtgctggtatttgattccggcgtcggtggattgtcggtctatgatgagattcggcggctcctgccggatctccactatatatatgctttcgataacgtggctttcccctacggggaaaagagtgaaacgtttatcgtcgagcgcgttgtcgagattgtgactgcggtacagcagcgctatcccctttcactggcggtgattgcctgtaataccgccagtacggtctcacttcccgcattacgtgaaaagtttgccttcccggtggtgggcgttgtgcctgcgattaaaccagcggcgcggctgaccgcaaatggcgtcgtcgggctactggcgacgagagccacggtcaaacgtccttatactcacgagctgattgcgcgcttcgccaatgaatgtcagatagcgatgttagggtcggcagaactggtggaactggcggaagctaaattacatggcgattcggtatcgctggaagaactgcgccgcatattacgcccatggctacgaatgccggagccgcctgacacggtcgttctggggtgtacgcatttccctctattacgggacgagcttttgcaagtcctgcccgaagggacgcggttagtggattccggcgcggcgatagcgcgtcgtacagcctggctgttggaacatgaagcgccggatgcgaaatcaaccgatgccaatattgcttattgcatggcaatgacgccaggagctgaacaattattacccgttttacagcgttatggctttgaaacgctcgaaaaactgccggtttaatggcgttttgggtaaataccaggcacttgagaaattattttaaatttcctcttgtcaggcagaaataactccctataatgcgccaccactgacacggaacaacggcacacaggccgccgggccagcggggttcagatcagaacctcacggagaaaagcgaaaataaacgcttgactctgaagcgggaaagcgtaatatgcacaccccgcgccgctgagaaaaagcgaagcggcactgctctttaacaatttatcagacaatctgtgtgggcactcgaagatacggattcttgacgtcctaggacgaaaaatgaataccaagtctcaagagtgaacacgtaattcattacgaagtttaattctttgagcatcaaacttttaaattgaagagtttgatcatggctcagattgaacgctggcggcaggcctaacacatgcaagtcgaacggtaacaggaagcagcttgctgcttcgctgacgagtggcggacgggtgagtaatgtctgggaaactgcctgatggagggggataactactggaaacggtggctaataccgcataacgtcgcaagaccaaagagggggaccttcgggcctcttgccatcagatgtgcccagatgggattagcttgttggtgaggtaacggctcaccaaggcgacgatccctagctggtctgagaggatgaccagccacactggaactgagacacggtccagactcctacgggaggcagcagtggggaatattgcacaatgggcgcaagcctgatgcagccatgccgcgtgtatgaagaaggccttcgggttgtaaagtactttcagcggggaggaaggtgttgtggttaataaccgcagcaattgacgttacccgcagaagaagcaccggctaactccgtgccagcagccgcggtaatacggagggtgcaagcgttaatcggaattactgggcgtaaagcgcacgcaggcggtctgtcaagtcggatgtgaaatccccgggctcaacctgggaactgcattcgaaactggcaggcttgagtcttgtagaggggggtagaattccaggtgtagcggtgaaatgcgtagagatctggaggaataccggtggcgaaggcggccccctggacaaagactgacgctcaggtgcgaaagcgtggggagcaaacaggattagataccctggtagtccacgccgtaaacgatgtctacttggaggttgtgcccttgaggcgtggcttccggagctaacgcgttaagtagaccgcctggggagtacggccgcaaggttaaaactcaaatgaattgacgggggcccgcacaagcggtggagcatgtggtttaattcgatgcaacgcgaagaaccttacctggtcttgacatccacagaagaatccagagatggatttgtgccttcgggaactgtgagacaggtgctgcatggctgtcgtcagctcgtgttgtgaaatgttgggttaagtcccgcaacgagcgcaacccttatcctttgttgccagcgattaggtcgggaactcaaaggagactgccagtgataaactggaggaaggtggggatgacgtcaagtcatcatggcccttacgaccagggctacacacgtgctacaatggcgcatacaaagagaagcgacctcgcgagagcaagcggacctcataaagtgcgtcgtagtccggattggagtctgcaactcgactccatgaagtcggaatcgctagtaatcgtggatcagaatgccacggtgaatacgttcccgggccttgtacacaccgcccgtcacaccatgggagtgggttgcaaaagaagtaggtagcttaaccttcgggagggcgcttaccactttgtgattcatgactggggtgaagtcgtaacaaggtaaccgtaggggaacctgcggttggatcacctccttaccttaaagaaacggtctttgaagtgctcacacagattgtctgatgaaaaacgagcagtaaaacctctacaggcttgtagctcaggtggttagagcgcacccctgataagggtgaggtcggtggttcaagtccactcaggcctaccaaattttccctgaatactgcgttgtgaaataactcacatactgatgtatgcttcgttattccacgccttgtctcaggaaaaattatcggtaaagaggttctgactacacgatggggctatagctcagctgggagagcgcctgctttgcacgcaggaggtctgcggttcgatcccgcatagctccaccatctcgtgagtgtttacgaaaaaatacttcagagtgtacctgaaagggttcactgcgaagttttgctctttaaaaatctggatcaagctgaaaattgaaacacagaacaacgaaagttgttcgtgagtctctcaaattttcgcgacacgagaatgttttacgaaacatcttcgggttgtgaggttaagcgactaagcgtacacggtggatgccctggcagtcagaggcgatgaaggacgtgctaatctgcgataagcgccggtaaggtgatatgaaccgttataaccggcgatttccgaatggggaaacccagtgtgattcgtcacactatcattaactgaatccataggttaatgaggcgaaccgggggaactgaaacatctaagtaccccgaggaaaagaaatcaaccgagattcccccagtagcggcgagcgaacggggaggagcccagagcctgaatcagcatgtgtgttagtggaagcgtctggaaaggcgcgcgatacagggtgacagccccgtacacaaaagcgcatgtgctgtgagctcgatgagtagggcgggacacgtggtatcctgtctgaatatggggggaccatcctccaaggctaaatactcctgactgaccgatagtgaaccagtaccgtgagggaaaggcgaaaagaaccccggcgaggggagtgaaaaagaacctgaaaccgtgtacgtacaagcagtgggagcacccttcggggtgtgactgcgtaccttttgtataatgggtcagcgacttatattctgtagcaaggttaaccgtataggggagccggagggaaaccgagtcttaattgggcgttaagttgcagggtatagacccgaaacccggtgatctagccatgggcaggttgaaggttgggtaacactaactggaggaccgaaccgactaatgttgaaaaattagcggatgacctgtggctgggggtgaaaggccaatcaaaccgggagatagctggttctccccgaaagctatttaggtagcgcctcgtgaattcatctccgggggtagagcactgtttcggctagggggccatcccggcttaccaacccgatgcaaactgcgaataccggagaatgttatcacgggagacacacggcgggtgctaacgtccgtcgtgaagagggaaacaacccagaccgccagctaaggtcccaaagtcatggttaagtgggaaacgatgtgggaaggcccagacagccaggatgttggcttagaagcagccatcatttaaagaaagcgtaatagctcactggtcgagtcggcctgcgcggaagatgtaacggggctaaaccatgcaccgaagctgcggcagcgaacgtatcacccaagacaactttacggagttgacgattgacggagcgaagcgacgtcaaagcgttcattaaagtcgagttggcttagggatacgttcgttgggtaggggagcgttctgtaagcctgtgaaggtgtgtcgtgaggcatgctggaggtatcagaagtgcgaatgctgacataagtaacgataaagcgggtgaaaagcccgctcgccggaagaccaagggttcctgtccaacgttaatcggggcagggtgagtcgacccctaaggcgaggccgaaaggcgtagtcgatgggaaacgggttaatattcccgtacttggtgttactgcgaaggggggacggagaaggctatgttggccgggcgacggttgtcccggtttaagcgtgtaggtgtgtgttccaggtaaatccggttcactttaacactgaggcgtgacgacgaggcactacggtgctgaagcaacaaatgccctgcttccaggaaaagcctctaagcatcaggtaacacgaaatcgtaccccaaaccgacacaggtggtcaggtagagaataccaaggcgcttgagagaactcgggtgaaggaactaggcaaaatggtgccgtaacttcgggagaaggcacgctgacacgtaggtgaagtgatttactcatggagctgaagtcagtcgaagataccagctggctgcaactgtttattaaaaacacagcactgtgcaaacacgaaagtggacgtatacggtgtgacgcctgcccggtgccggaaggttaattgatggggtcagcgtaagcgaagctcctgatcgaagccccggtaaacggcggccgtaactataacggtcctaaggtagcgaaattccttgtcgggtaagttccgacctgcacgaatggcgtaatgatggccaggctgtctccacccgagactcagtgaaattgaactcgctgtgaagatgcagtgtacccgcggcaagacggaaagaccccgtgaacctttactatagcttgacactgaacattgagccttgatgtgtaggataggtgggaggctttgaagtgtggacgccagtctgcatggagccgaccttgaaataccaccctttaatgtttgatgttctaacgtggacccgtaatccgggttgcggacagtgtctggtgggtagtttgactggggcggtctcctcctaaagagtaacggaggagcacgaaggttggctaatcctggtcggacatcaggaggttagtgcaatggcataagccagcttgactgcgagcgtgacggcgcgagcaggtgcgaaagcaggtcatagtgatccggtggttctgaatggaagggccatcgctcaacggataaaaggtactccggggataacaggctgataccgcccaagagttcatatcgacggcggtgtttggcacctcgatgtcggctcatcacatcctggggctgaagtaggtcccaagggtatggctgttcgccatttaaagtggtacgcgagctgggtttagaacgtcgtgagacagttcggtccctatctgccgtgggcgctggagaactgaggggggctgctcctagtacgagaggaccggagtggacgcatcactggtgttcgggttgtcatgccaatggcactgcccggtagctaaatgcggaagagataagtgctgaaagcatctaagcacgaaacttgccccgagatgagttctccctgagacttagagtctcctgaaggaacgttgaagacgacgacgttgataggccgggtgtgtaagcgcagcgatgcgttgagctaaccggtactaatgaaccgtgaggcttaaccttacaacgccgaagatgttttggcggttaagagaagattttcagcactgattcagagttgagtacgcaataatttgcgcagcagcgaggcggcaagcgaaggaaaggaaggagcatacagaagtatgtgactgactttacgagcgcaggcaacgccgctgatgcgataaagaattgcgtacagagcacaaagaatttgcctggcggcactagcgcggtggtcccacctgaccccatgccgaactcagaagtgaaacgccgtagcgccgatggtagtgtggggtctccccatgcgagagtagggaactgccaggcatcaaataaaacgaaaggccctgtcggaagacagggccttttgtttttgtctgtttctgccggatggcggctccgccttatccggcctacagggacgcgccgatctaccctcattataaccacaagccttcccaacacagatacggtaaactattgccgattgagtatcaggaaagcagccatgacccactccctaaaaccctggaataccttcggcattgatcattgtgcaaagcacatcgtatgcgctgaaaacgaacaacaactactgagcgcctggcagcaagcaactcgtgagggactgccggttatgatcctgggtgaaggaagcaatgtcctgtttctggaaaattacgccggcaccgtgatccttaaccgcctgaaaggcattgaggtcaatgaaaccgcggacgcctggcacctacacgtcggcgcaggcgaaaactggcatcagctggttcgctacgcgctggacaacaacatgcccggcctggagaatctggcgctcatccctggctgcgttggttcctcgcctatacagaatattggcgcgtatggcgtagaactacagcgcgtctgcgactacgttgactgcgttgaactggaaacgggaaaacgtctgcgtttgtccgcggcggaatgccgtttcggctatcgtgacagtatcttcaaaaatgaatatcaggatcgcgttgcgatcgtcgcggtgggtctgcgtttgtcaaagcaatggcagccggtgttgacctatggcgatcttacttgtttggacccgaaaacggtcaccgcgcaacaggtgtttgatgctgtatgccatatgcgcaccacaaaattgccggatcctaaagtgaatggcaatgcgggcagcttttttaaaaatcccgttgtcgcagccgatatcgctatggaactgttagaacgatttcccaacgcgccgcattaccctcaggcagacggctcagtgaagctggcggcaggctggctgatagatcaatgtcagttgaaaggcgtcaccattggcggcgctgcggtgcatcgccaacaggcgctggtattgattaatgcgaatgatgcgacaagtaaagatgtggtggcgctggcgcatcatgtccggcaaaaagtgggtgaaaaatttaatgtctggctggagcctgaggttcgctttattggtcggtccggagaggtgaacgctgtggagagcattgcatgaaagatactaccgttcccctgacgctgatctcactacttgccgacggagagtttcactcaggcgagcagttgggtgaacggctgggaatgagccgcgcggctattaataaacatatccagacattacgcgactggggagtagatgtatttaccgttcccgggaaaggatatagcttaccggaacccatccagttactggatgctgaccgtatacatagccaactggatagcggaaacgtggcggtattgcccgttatcgattcaaccaatcagtatttacttgatcgaattggcgagctgcgctcaggcgatgcctgtgtagcagaataccaacaggcggggcgtggtcgtcgcgggcgtaaatggttctcaccgtttggcgcgaatctatatctttcaatgtactggcgtctggagcagggccctgcggcggcaataggcctgagtctggtcattggaattgtgatggcggaagtgctgcgtaaactgggcgcagataaagttcgtgtgaagtggcctaacgacctttacctactggaccgcaaactggcgggtattctggtcgagttaaccggtaaaacgggcgatgccgcacaaatagtgattggcgctggtattaacatggcaatgcgtcgcgtagaagaggacgtgataaatcagggatggatcacactacaagaggccggaattacgctcgaccgcaatatgctggccgcaaagctgatttataagctacgtgctgcgcttgagctttttgagcaagaaggtctttctccttatctttcgcgctggaaaaaactggataattttattgatcgcccggtaaaactaattattggtgacaaagaaatatttggtatttctcgcggcattgatactcaaggcgcattattgcttgaacaggatggcgtgattaaaccctggatgggcggagaaatatcgctgcgaagcgccgaatagtaaaaagggggagtcggtactccccttttttctgttatttccgcaatcttacctgttccaccgcatggttagcgctcttggtcataataaggctggcacgttctcgtgtaggtaagatattttgttttaaattcaaccagttaatttctttccaaagcgaagttgctgtattaacagcttcttctttagataatttcgcataattgtggaaataagagtcaggatcggtaaacgccccttcgcggaatttcaggaagcgattgatataccacgtctgaagaagttcttctggcgcatccacgtaaatagagaaatcaacgaaatcagagacaaatacatgatgcggatcgtgaggataatccataccgctttgtaaaacattcaaaccttcaagaatcaatatatcaggctgagcgacggttttatccccttcaggaataacatcgtaaatcaaatgagaatagactggcgccgtcacgttcggtacgcccgacttgaggtcagaaacgaatttcaccagtcggtgcatatcatacgattcggggaacccctttttcttcattaacccgcgttctttcaacacctggtttgggtggaggaagccgtctgtggtaatcaattcaacacggcggtgttccggccagcgactcagcaacgcttgcagaacgcgtgctgtcgtgcttttacccactgcgacgctgcccgcgatactgatgatgtaagggattcgctggccgttagtgcccagaaactgttccaggacagcctgacgacgcagatttgaactgatatagaaatttagcaaacgggagagaggtaaatatatttctgcaacttcttccagcgataaatcttcattaatgccttttaactgcgcgatctcatcctcggtcagggtcatcggcacagaatcgcgaagcgcagcccactggctgcgatcaaactgtaggtaaggcgtcattaacgattgctcttttatactcataagcatgtttctggctgctattgctacatcagttcagcgatgaacgagggccatccctgacatgcaacggcacgtcacatttaagttaatttggacaatgggcaggagggtaacaccagatggggaggaataataagaaaaaatctcgctgtgaaagctatccctgagaagcaatgtgacgaatataccagatacagaagattgctttctatcgacggagcgttgaaatgccgcgtcgtatcctggtcagacggtcggtaaaatgccgaaaatttatgctctcttgtttgaaattagagcatttttgtctcttatagcgcaaaatgtgagcgatagaacattttatgcaattttttagttgcatgagcacgcaggtctccatagaatgcgcgctacttgatgccgacttagctcagtaggtagagcaactgacttgtaatcagtaggtcaccagttcgattccggtagtcggcaccatcaagtccggtggggttcccgagcggccaaagggagcagactgtaaatctgccgtcacagacttcgaaggttcgaatccttcccccaccaccattttcggccgcgcgatggcgcagcccgagacgataagttcgcttaccggctcgaataaagagagtttctctcgatattcagtgcagaatgaaaatcaggtagccgagttccaggatgcgggcatcgtataatggctattacctcagccttccaagctgatgatgcgggttcgattcccgctgcccgctccaagatgtgctgatatagctcagttggtagagcgcacccttggtaagggtgaggtcggcagttcgaatctgcctatcagcaccacttcttttctccttcctgtttttctcttctgtttattagcattcaacaagtcgggcgtgttgcctggttgatgtggtgatatcaccgatttatccgtgtcttagagggacaatcgatgtctaaagaaaagtttgaacgtacaaaaccgcacgttaacgtcggtactatcggccacgttgaccatggtaaaacaacgctgaccgctgccattactaccgtactggctaaaacctacggcggtgccgctcgcgcattcgaccagatcgataacgcgccggaagaaaaagcgcgtggtatcaccatcaacacttctcacgttgaatacgataccccgacccgccactacgcacacgtagactgcccggggcacgccgactatgttaaaaacatgatcaccggtgctgctcagatggacggcgcgatcctggttgttgctgcgactgacggtccgatgccgcagacccgtgagcacatcctgctgggtcgtcaggtaggcgttccgtacatcatcgtgttcctgaacaaatgcgacatggttgatgacgaagagctgctggaactggttgaaatggaagttcgtgaacttctgtctcagtacgacttcccgggcgacgacacgccgatcgttcgtggttctgctctgaaagcgctggaaggcgacgcagagtgggaagcgaaaatcatcgaactggctggcttcctggattcttacatcccggaaccagagcgtgcgattgacaagccgttcctgctgccgatcgaagacgtattctccatctccggtcgtggtaccgttgttaccggtcgtgtagaacgcggtatcatcaaagtgggcgaagaagttgaaatcgttggtatcaaagagactcagaagtctacctgtactggcgttgaaatgttccgcaaactgctggacgaaggccgtgccggtgagaacgtaggtgttctgctgcgtggtatcaaacgtgaagaaatcgaacgtggtcaggtactggctaagccgggcaccatcaagccgcacaccaagttcgaatctgaagtgtacattctgtccaaagatgaaggcggccgtcatactccgttcttcaaaggctaccgtccgcagttctacttccgtactactgacgtgactggcaccatcgaactgccggaaggcgtagagatggtaatgccgggcgacaacatcaaaatggttgttaccctgatccacccgatcgcgatggacgacggtctgcgtttcgcaatccgtgaaggcggccgtaccgttggcgcgggcgttgttgctaaagttctcggctaatcgctgataacatttgacgcaatgcgcaataaaagggcatcatttgatgccctttttgcacgctttcacaccagaacctggctcatcagtgattttatttgtcataatcattgctgagacaggctctgtagagggcgtataatccgaaaggcgaataagcgtttcgatttggattgcctcgcgattgcggggtgaaaatgtttgtagaatacttctgacaggttggtttatgagtgcgaataccgaagctcaagggagcgggcgcggcctggaagcgatgaagtggatagttgttgccatattgctgatcgtcgcaatcgtcggcaactacctctatcgcgacatgatgctgccgctgcgtgcgctggccgtagtaattctgattgctgcagcgggtggtgtcgcgctgttgacgacaaaaggtaaagcaaccgttgcttttgcccgtgaagcgagaaccgaagtccgtaaggtcatttggccgactcgccaggaaacgctgcacaccacgctgatcgtcgctgcggttaccgcagttatgtcactgatcctgtggggactggatggtattctggttcgcctggtatcctttatcactggcctgaggttctgagatgtctgaagcacctaaaaagcgctggtacgtcgttcaggcgttttccggttttgaaggccgcgtagccacatcgctgcgcgagcatatcaaattacacaatatggaagagctgtttggcgaagtcatggtgccgactgaagaagtcgttgagatccgtggcggccagcgtcgcaaaagcgaacgcaaattcttcccgggttacgttctggtccagatggtcatgaacgacgcaagctggcacctggtgcgcagcgtgccgcgtgtgatgggctttatcggcggtacctctgaccgtccggcgccgatcagcgacaaagaagtcgatgcgatcatgaaccgcctgcagcaggttggcgataagccgcggccgaaaactctgtttgaaccgggtgaaatggttcgtgttaacgacggtccgttcgcagactttaacggcgttgtcgaagaagtcgattatgagaagtctcgcctgaaagtgtctgtttctatcttcggtcgtgcgaccccggtagagctggacttcagtcaggttgagaaagcgtaaggctgcgatcaaaaaagcagcgatctaatcgttgcatagggcgcgaaattgacatacaatttcgcgccttttgtttttatgggccttatgcccataaagcgatatttatcacggggagcttctttgaagcgatactacccaattcgaggaatttagaatggctaagaaagtacaagcctacgtcaagctgcaggttgcagctggtatggcgaacccgagtccgccggttggtccagcactgggtcagcagggtgtgaacatcatggaattctgcaaagcgttcaacgcaaaaacggattccatcgaaaaaggtctgccgattccggttgttattaccgtttacgctgaccgttctttcaccttcgttaccaaaacgcctccggcagctgttctgctgaaaaaagcggctggtatcaagtctggttccggcaagccgaacaaagacaaagtaggtaaaatttcccgcgctcagctgcaggaaatcgcgcagaccaaagctgccgacatgaccggtgccgacattgaagcgatgactcgctccatcgaaggtactgcacgttccatgggcctggtagtggaggactaagaaatggctaaactgaccaagcgtatgcgcgtgatccgtgaaaaagttgatgcgaccaaacagtacgacatcaacgaagctattgccctgctgaaagagctggccactgctaaattcaacgaaagcgttgacgttgccgttaacctcggcatcgacgctcgtaaatctgaccagaacgttcgtggcgcgactgtactgccgcacggtactggccgttctgttcgcgttgccgtatttacccaaggcccgaacgctgaagcagctaaagctgctggcgctgagctggtaggtatggaagatctggctgaccagatcaagaaaggcgaaatgaacttcgacgttgttatcgcatccccggatgcaatgcgcgttgttggccagctgggccaggttctgggtccgcgcggcctgatgccaaacccgaaagtcggtaccgtaactccgaacgttgctgaagcggttaagaacgctaaagcaggtcaggttcgttaccgtaacgacaaaaacggcatcatccacaccaccatcggtaaagtggactttgacgctgacaaactgaaagaaaacctggaagctctgctggttgcgctgaaaaaagcaaaaccgagccaggcgaaaggcgtgtacatcaagaaagttagcatctccaccaccatgggtgctggcgttgccgttgatcaggctggtctgagcgcatctgcgaactaagattagtctttacgtgggcggtgattttgtctacaatcttacccccacgattctgttgaaatataacagagcactatgcgagtcatttgaattgcagcaaggcagcaagtgagtgagtcgccaggagcatagttaactatgtgactggtgtgaacgagcgcagctaacacagctgcggttcaaaggacgaagtcatagaaagaatttgttcgttggagcctggcctatccaggcctccgtcgaagaccgcaggcgtctcgcaagaggcttaatcccctgcgtagacggtgacagaacgctaagattattttttatactctggcttgtttctgctcaccgtattaagacgctcttctcgttgagatgagtgaagtgagttccggaacatgagttccggcaaacatccaggagcaaagctaatggctttaaatcttcaagacaaacaagcgattgttgctgaagtcagcgaagtagccaaaggcgcgctgtctgcagtagttgcggattcccgtggcgtaactgtagataaaatgactgaactgcgtaaagcaggtcgtgaagctggcgtatacatgcgtgttgttcgtaacaccctgctgcgccgcgtcgttgaaggtactcagttcgagtgcctgaaagacacgtttgttggtccgaccctgattgcatactctatggaacacccgggcgctgctgctcgtctgttcaaagagttcgcgaaagcgaatgcaaaatttgaggtcaaagctgcagcctttgaaggtgagctgatcccggcgtctcagatcgaccgcctggcaactctgccgacctacgaagaagcaattgcacgcctgatggcaaccatgaaagaagcttcggctggcaaactggttcgcacactggctgctgtacgcgatgcaaaagaagctgcgtaatcgcagttgtctttatcaagcatttgcttacgtataaacttattctgatattcaggaacaatttaaatgtctatcactaaagatcaaatcattgaagcagtatccgctatgtccgtaatggacgttgtagaactgatttctgcaatggaagaaaaattcggtgtttccgctgctgctgctgtagctgtagctgctggcccggctgaagctgctgaagaaaaaactgaattcgacgtaattctgaaagctgctggcgctaacaaagttgctgttatcaaagcagtacgtggcgcaactggcctgggtctgaaagaagctaaagacctggtagaatctgctccggccgctctgaaagaaggcgtgagcaaagatgacgctgaagcactgaaaaaatctctggaagaagctggcgctgaagttgaagttaaataagccaacccttccggttgcagcctgagaaatcaggctgatggctggtgactttttagtcaccagcctttttgcgctgtaaggcgccagtagcgtttcacactgtttgactactgctgtgcctttcaatgcttgtttctatcgacgacttaatatactgcgacagagcgtacgttctgtgtaaatcgcaatgaaatggtttaagcgtgatagcaacaggcattgcggaaagtatccattttccggtcaacaaaatagtgttgcacaaactgtcccccgcaggacagatgggtcgacttgtcagcgagctgaggaaccctatggtttactcctataccgagaaaaaacgtattcgtaaggattttggtaaacgtccacaagttctggatgtaccttatctcctttctatccagcttgactcgtttcagaagtttatcgagcaagatcctgaagggcagtacggcctggaagcagccttccgttccgtgttcccgattcagagctacagcggtaattccgagctgcagtacgtcagctaccgccttggcgaaccggtgtttgacgttcaggaatgtcagatccgtggcgtgacctattccgcaccgctgcgcgtaaaactgcgtctggtgatctacgagcgcgaagcgccggaaggcaccgtaaaagacattaaagaacaagaagtctacatgggcgaaattccgctcatgaccgacaacggtacctttgttatcaacggtactgagcgtgttatcgtttctcagctgcaccgtagccctggcgtcttctttgactccgacaaaggtaaaacccactcttcgggtaaagtgctgtataacgcgcgcatcattccttaccgtggttcctggctggacttcgaattcgatccgaaggacaacctgttcgtacgtatcgaccgtcgccgtaaactgcctgcgaccatcatcctgcgtgcgctgaactacaccactgagcagatccttgacctgttctttgagaaagtcgtcttcgaaattcgcgacaacaaactgcagatggagctgattccagaacgtctgcgtggcgaaaccgcgtcgttcgatatcgaagctaacggcaaagtgtacgttgaaaaaggccgtcgcattaccgcgcgtcacatccgtcagctggaaaaagacgatatcaagcatatcgaagttccggttgagtacatcgcaggtaaagtcgtctctaaagactacgttgacgaatctactggcgagctgatctgcgcggcgaacatggagctgagcctggatctgctggctaagctgagccagtccggccacaagcgtatcgaaacgctgtttaccaacgatctggaccacggcccgtacatttctgaaacggtacgcgtcgacccaactaacgatcgtctgagcgcgctggtagaaatctaccgcatgatgcgccctggtgagccgccgacacgcgaagcggctgaaagcctgtttgagaacctgttcttctccgaagaccgctatgacctgtctgcggtgggtcgtatgaagttcaaccgttctctgctgcgcgacgaaatcgaaggttccggtatcctgagcaaagacgacatcattgatgtcatgaagaagctcatcgatatccgtaacggtaaaggcgaagtggatgatatcgaccacctcggcaaccgtcgtatccgttccgtcggcgaaatggcggaaaaccagttccgcgttggcctggtgcgtgtagagcgtgcggtgaaagagcgtctgtctctgggcgatctggataccctgatgcctcaggatatgatcaacgccaagccgatttccgccgcagtgaaagagttctttggttccagccagctgtctcagtttatggaccagaacaacccgctgtctgagattacgcacaaacgtcgtatctccgcactcggcccaggcggtctgacccgcgaacgcgcaggcttcgaagttcgagacgtacacccgacgcactacggtcgcgtatgtcctatcgaaacgccggaaggtccgaacatcggtctgatcaactccctgtccgtgtacgcacagactaacgaatatggcttccttgagacgccgtaccgtcgtgtggttgatggcgtggttactgacgaaattcattacctgtctgctatcgaagaaggcaactacgttatcgctcaggcgaactccaacctggatgacgaaggccactttgtagaagatttggtgacctgccgtagcaaaggcgaatccagcttgttcagccgcgaccaggttgactacatggacgtttccacccagcaggtggtctccgtcggtgcgtccctgatcccgttcctggaacacgatgacgccaaccgtgcattgatgggtgcgaacatgcaacgtcaggcggttccgactctgcgcgctgacaagccgctggtgggtaccggtatggaacgtgctgtcgccgtcgactccggtgttactgcagtagctaaacgtggcggtactgttcagtacgtggatgcgtcccgtatcgttatcaaagttaacgaagacgagatgtacccgggcgaagcgggtatcgacatctataacctgaccaaatacacccgctctaaccagaacacctgtatcaaccagatgccatgtgtgtctctgggcgagccggttgaacgcggcgacgtgctggcagacggtccgtccaccgacctcggtgaactggcgctcggtcagaacatgcgcgtggcgttcatgccgtggaacggctacaacttcgaagactccattctcgtttccgagcgtgttgtccaggaagaccgtttcaccaccatccacattcaggaactggcgtgcgtgtcccgtgacaccaagctggggccggaagagatcaccgctgatatcccgaacgtgggtgaagctgcgctctccaaactggatgaatccggtatcgtttacatcggcgcggaagtgacaggcggtgacattctggtcggtaaggtgacgccgaaaggtgaaacccagctgacgccggaagagaaactgctgcgtgcgatcttcggtgagaaagcgtctgacgttaaagactcttctctgcgcgtacctaacggtgtctccggtacggttatcgacgttcaggtctttactcgcgatggcgtagaaaaagacaaacgtgctctggaaatcgaagagatgcagctcaagcaggcgaaaaaagacctgtctgaagaactgcagatcctcgaagcgggcctgtttagccgtatccgtgcggtgctggtttccagcggcgttgaagctgagaagctcgacaaactgccgcgcgaccgctggctggaactcggtctgaccgacgaagagaaacaaaatcagctggaacaactggctgagcagtatgacgaactgaaacacgagttcgagaaaaaacttgaagcgaagcgccgtaaaatcacccagggcgacgatctggcgccgggcgtgctgaagatcgtgaaggtctatctggccgttaaacgccgtatccagccgggtgataagatggcaggtcgtcacggtaacaagggtgttatctctaagatcaacccgatcgaagacatgccttacgatgaaaacggcacgccggtagacatcgtactgaacccgctgggcgtaccgtctcgtatgaacatcggccagattctggaaacccacctgggtatggctgcgaaaggtattggcgacaagattaacgccatgctgaaacagcagcaggaagtcgcgaaactgcgcgaattcatccagcgtgcctacgatctgggcgccgacgttcgtcagaaagtcgacctgagcaccttcagcgatgatgaagtgctgcgtctggcagaaaacctgcgtaaaggtatgccgattgccacaccagtgtttgacggtgcgaaagaagcggaaatcaaagagctgctgaaactgggcgacctgccgacctccggtcagatcaccctgttcgatggccgtacgggtgaacagttcgaacgtccggtaaccgtcggttacatgtacatgctgaaactgaaccacctggttgatgacaagatgcatgcgcgttctaccggttcttacagcctggttactcagcagccgctgggtggtaaggcgcagttcggtggtcagcgcttcggggagatggaagtgtgggcgctggaagcttacggcgccgcctacaccctgcaggaaatgctcaccgttaagtctgatgacgtgaatggtcgtaccaagatgtataagaacatcgtggacggcaaccatcagatggaaccgggtatgccggaatccttcaacgttctgttgaaagagatccgctcgctgggcatcaacatcgaactggaagacgagtaattctcgctcaaacaggtcactggtgtcggggtaaaacccgacaccagattgtgctaactccgacgggagcaaatccgtgaaagatttattaaagtttctgaaagcgcagactaaaaccgaagagtttgatgcgatcaaaattgctctggcttcgccagacatgatccgttcatggtctttcggtgaagttaaaaagccggaaaccatcaactaccgtacgttcaaacctgagcgtgacggccttttctgcgcccgtatctttgggccggtaaaagactacgagtgcctgtgcggtaagtacaagcgcctgaaacatcgtggtgttatttgtgagaagtgcggcgttgaagtgacccagaccaaagtacgccgtgagcgtatgggccacatcgagctagcgtccccgactgctcacatctggttcctgaaatcgctgccgtcccgtatcggtctgctgctcgatatgccgctgcgcgatatcgaacgcgtactgtacttcgaatcttatgtggttatcgaaggcggtatgaccaacctggaacgtcaacagatcctgactgaagagcagtatctggacgcgctggaagagttcggtgacgaattcgacgcgaagatgggggcggaagctatccaggccctgctgaagagcatggatctggagcaagagtgtgaaactctgcgcgaagagctgaacgaaaccaactccgaaaccaagcgtaaaaagctgaccaagcgtatcaaactgctggaagccttcgttcagtctggcaacaagccagagtggatgatcctgaccgttctgccggttctgccgccagatctgcgtccgctggttccgctggatggtggtcgtttcgccacgtcagatctgaacgatctgtatcgtcgcgtcattaaccgtaacaaccgtctgaagcgtctgctggatctggctgcgccggacatcatcgtacgcaacgaaaaacgtatgctgcaggaagcggttgacgccctgttggataacggtcgtcgcggtcgtgcgatcaccggttctaacaagcgtcctctgaaatctttggccgacatgatcaaaggtaagcagggtcgtttccgtcagaacctgctcggtaagcgtgttgactactccggtcgttctgtaatcaccgtaggtccatacctgcgtctgcaccagtgcggtctgccgaagaaaatggcgctggagctgttcaaaccgttcatctacggcaagctggaactgcgtggccttgccaccaccatcaaagccgcgaagaaaatggttgagcgtgaagaagctgtcgtttgggatatccttgacgaagttatccgcgaacacccggtactgctgaaccgtgcaccgactctgcaccgtctgggtatccaggcatttgaaccggtactgatcgaaggtaaagctatccagctgcacccgctggtttgtgcggcatataacgccgacttcgatggtgaccagatggctgttcacgtaccgctgacgctggaagcccagcttgaagcgcgtgcgctgatgatgtctaccaacaacatcctgtctccggcgaacggcgaacctatcatcgttccgtctcaggacgtggtattgggtctgtactacatgacccgtgactgtgttaacgccaaaggcgaaggcatggtgctgactggcccgaaagaagctgagcgtatctatcgcgcaggtctggcctctctgcatgcgcgcgttaaagtgcgtatcactgaatatgaaaaagatgaaaacggcgaattcgttgcgcacaccagcctgaaagacacgaccgttggtcgcgccattctgtggatgatcgtaccgaaaggtctgcctttctccatcgtcaaccaggcgctgggcaagaaagcgatctccaaaatgctgaacacttgctaccgtattctgggcctgaaaccgaccgttatttttgcggaccagacgatgtacaccggctttgcttatgcagcgcgttcaggtgcgtccgttggtattgatgacatggtcatcccggagaaaaaacacgagatcatctctgaggcggaagctgaagttgctgagatccaggagcagttccagtctggtctggtaaccgctggcgaacgctataacaaagttatcgatatctgggctgcggcgaacgatcgtgtatctaaagcgatgatggataacctgcaaaccgaaaccgtgattaaccgtgacggccaggaagagcagcaggtttccttcaacagcatctacatgatggccgactccggtgcgcgtggttctgcggcacagattcgtcagcttgctggtatgcgtggtctgatggcgaagccggatggctccatcatcgaaacgccaatcaccgcgaacttccgtgaaggtctgaacgtactccagtacttcatctccacccacggtgcgcgtaaaggtctggcggataccgcactgaaaaccgcgaactccggttacctgactcgtcgtctggttgacgtcgcgcaggatctggtagtgaccgaagatgactgtggtacgcacgaaggtatcctgatgaccccggttatcgagggtggcgacgtgaaagagccgctgcgtgaccgcgttctgggtcgtgtgacggcggaagatgtgctgaaaccgggtaccgcggacattctggttccacgcaacacgctgctgcacgaacagtggtgtgacctgctggaagcaaactccgttgacgccgttaaagtgcgttctgttgtatcctgcgacaccgactttggtgtatgtgcgcactgctatggccgtgacctggcgcgtggccacatcatcaacaaaggtgaagctatcggcgttatcgcggcacagtccatcggtgaaccgggtacacagctgacgatgcgtacgttccacatcggtggtgcggcatcgcgtgcggctgctgaatccagcatccaggttaagaacaaaggtagcatcaagctcagcaacgtgaagtcggttgtgaactccagcggtaaactggttatcacttctcgtaacaccgaactgaagctgatcgacgaattcggtcgtaccaaagagagctataaagtgccttatggcgctgtcatggcgaaaggtgatggcgagcaggttgccggcggcgaaaccgtggcaaactgggacccgcacaccatgccggttatcaccgaagtgagtggtttcatccgcttcactgacatgatcgacggtcagaccattacgcgtcagaccgacgaactgaccggtttgtcttcgctggtggttctggattcggctgaacgtactaccggtggtaaagatctgcgtccggcgctgaaaatcgttgatgctcagggtaatgacgttctgatcccgggtaccgatatgcctgcgcagtacttcctgccgggtaaagcgattgtacagctggaagatggcgtacagatcagttctggtgacaccctggcgcgtattcctcaggaatccggcggtaccaaggatatcaccggtggtctgccgcgcgttgcggacctgttcgaagcgcgtcgtccgaaagaaccggccattctggcggaaatcgcaggtatcgtttccttcggtaaagaaaccaaaggcaaacgtcgtctggtgattacgccggttgatggtagcgatccgtacgaagagatgattccgaaatggcgtcagctcaacgtgttcgaaggggaacgtgtagaacgtggtgatgtgatttccgacggtccggaagcgccgcacgatattctgcgtctgcgtggtgttcatgctgtgacgcgttacatcgttaacgaagtccaggatgtataccgtctgcagggcgttaagattaacgataaacacatcgaagttatcgttcgtcagatgctgcgtaaagcgaccatcgaaagcgccggtagttccgacttcctggaaggcgaacaggttgaatattcccgcgtcaagatcgctaaccgcgagctggaagcgaacggcaaagtgggggctaccttctcccgcgatctgctgggtatcaccaaagcgtctctggcaaccgaatcgttcatctctgccgcatcgttccaggagaccacgcgtgtcctgaccgaagcagccgttgcgggtaaacgcgacgaactgcgcggcctgaaagagaacgttatcgtggggcgtctgatcccggcgggtaccggttatgcgtaccaccaggatcgtatgcgccgtcgcgccgcgggcgagcagccagcaacaccgcaggtcactgcggaagatgcatctgcaagcctggcagaactgctgaacgcaggtctgggcggttctgataacgagtaatcgttaaatggtggaggggtatttatccctccaccagcttcatgctggataccgaattccgggtcgcttgcctacaaggaaagaaaatgccagcgattatttcattaatctatttaatgtttagtcttttagtatttacaaaaaagataaccatttcaaacgttctgtccgcttttttattgtttctatcgttatatatacttcaccataaatcattacttatatttatttattgtcttattattattgtcgccaccgctattcttcatcgagtcaaaaccagcgcggataaaaaagccgtattttatttttcaatgccatgctggctcttggttttatctgtaattataaatattaatgaataaatgaattattttttcatgactcttgtttctcgtattattggtgaaaaatcattatcactggttatatgaataaattgtccagtttttgtattatattttgccatcgcacagggaagactattaccaccgttagccataacaaattttgcttttgtattacgataaagattgacgccaggaatggggtcttgaccgaatgtataaggcgttgggacaattacattatgtttgtttgagagccactttactaaaatcccgccaacgccatcaaccggcgtaataaaagtagagaatccacaatactcaaaattgaaattttttatcattgggtttgtttttttctgtaacattgattccaaatgtgactttaaatttatcccataaatctaagttattaaagtctattggctcgccattataaaatacctgctgttcatacattaaatgataaacctgttttattgattgtttacgcgggacattttaaattattaaatgaaggatttaattccattaaggtctttgtttgctcttattacaggaattataaatatgatgccatttctggaataaaagtaaagttaataaattatttatttaattgctcactggcagggtatttatgtatcctccggttaatgcttagtttagcatcttttagctgacagcgattgcaacgctaaaaaacatgtgctaataatcatcatgtaaaatatgtaatgaagtaagtatggagcatttaattgttatgatcccaccattaaatagatatgttcccgcgctttcaaaaaatgaattggttaaaactgttaccaacagggacattcagtttacaagttttaatggaaaagattatcccttgtgctttttagatgagaaaacccctcttcttttccagtggtttgagcggaatcctgctcgctttgggaaaaatgatatacctataattaacacagagaaaaacccctaccttaacaatatcattaaagcagcaacaattgaaaaagaacgtcttataggtatttttgtagatggtgatttttttccgggacaaaaggatgctttttcaaaacttgagtatgactatgaaaacataaaagtcatatatagaaatgatattgactttagtatgtacgataaaaaattatcagaaatttatatggaaaatatttctaagcaagagtccatgccagaagaaaaaagggattgtcatttactgcagctattgaaaaaagaattgagtgatattcaagagggtaatgattcattaattaaatcttacttactggataaaggccatggatggtttgatttttacaggaatatggctatgttaaaggctggtcagttatttttggaggcggataaggttgggtgttatgatttatcaacaaatagtgggtgtatatatcttgatgctgatatgattatcacggaaaaactggggggtatatatattccggatggaatcgctgttcatgtagaaaggatagatggccgtgcttctatggaaaacgggataatagctgttgatcgcaataaccacccggctttacttgctggattagaaataatgcatactaaatttgatgctgatccctattctgatggtgtatgtaatggaattagaaaacattttaattattctttaaatgaagattataattctttttgcgattttattgagtttaagcatgataacattataatgaataccagtcagtttacgcaaagttcatgggcgaggcatgtgcagtagcggaaatggcaataatcatgctattgaatacataaaatattggcataaactatcaagtttcggcgaaaaatatttgttgctcagttttctctactacaacaccactttaaaatcgcagtgctgttcagaacggagatatacggcattccttgtgaaatatgggagtaagaagagcttaaataatttaattggttattaaataacaattttatttatacagatatctgtcagattacatctggcttaaatttttgtcagcccagatgcgttttccatcaagtaacgttaccatcggcgtccggccgcaacacatttttccctgatgggttcgcccctgattcccgttgttctggggcatcattttatggacaaaaacgatcagcagacacggttggaagaggggccgccagcgaaattacagtcaggaacgctgcccgaaaacttcaagttcaccgctatttcgataatccagtggccagcccccggtcgtcagttactgatgaaggggtgaaggctgggcaataatgaggaagggatactttgccttggtcagcttccgttgctgacgatgacaaaataaaaaaacgggaggtcgataacaatctcccgtttttcgcattacgtactcgttcgtgaaatactaatgcgtttacatacgggttcaccgcgtttgcgaagcgcgccccagccaactgtcccagtctttccagacgggctgcaatccttgcgcgcttaacgcgcttgctactgtttcaggccgacgggcatcgtggggagaaaactgctccagttccggatgatcgtcagcgtagccgccgggctgcgtttttgagaaggcgctgacgttgttgattgccagaggaatcacatggtctcgaaaccacggcgattcgcgggtggagagtgataattcaatttccggcgccaataaccggaaagcgcaaatcgtttgcaccagttgcttttcatccatcacagatgcgggttccacaccgccagtacacggacgcagacgcgggaaggaaacagaatagcgactctgccagtagtgtttctgcatccacaacagatgctccgccaccatatagcaatccacccgccagttgtccgacagaccaattagcgcgccaagaccgattttgtcgatacctgcccggcctaaccgatccggcgtttccagccgccagaaaaagtcctgtttctttcccttcaggtgatgctgtgcatagattgcctcatgataagtctcctgataaaccatcacgccatcgatccccagtgttttgagctccgcatagttttcttgcgacaagggctggacttccatctgtaaagaggaaaattgacggcggatggtgggtaaatgacggcgaaaatagtccatgccgactttggcctgatgttcgccggtgactaacagcagatgctcaaagcccagtttacggatagcatcgcattccctttgaatatccacctcatccagcgttttacgcttaatgcggttgctcatcgaaaaaccgcagtaggtacagtcgttggcacagaggtttgagagataaagcggcacgtagaaactgacggtgttgccaaagcgttgtcgggtcagcctttgcgcccgctgcgctatcggttccagataatcggcggcggcgggggagagcagtgccatcaaatcatcccggctaagatgcgcggcgttcagcgcacgttccacgtcagcggcggttttaccattgatgcgcaggcgaatatcgtcccactccagttgccgccaacggtcggtgaaggttttcatgctaacgcctccagaaatccggtgagcgggctggtggcgttggcgtaggtgctacgattacccggcaccgcctgacgcgccagtactcccgcttctacagccaggcggaaagcggttgccatcattaccggatcgtccgccacggcaatcgccgtgttgaccagcaccgcatcagcgcccatttccagcgcctgcgccgcatggctgggcactccaatgcccgcatcaaccaccaccggcacggtggactgctggataataatctccagcatcgctttggtttccagcccctgattcgaaccgataggcgcgccgagcggcatcaccgccgcgcagccgacctcttccagccgcttgcacaacaccggatccgcgccgcagtagggcagcaccacaaaaccctgcttcaccagcgcctcggcggcttttagcgtttcgatcggatccggcagcagccagcgggcgtccggatggatttctaatttcagccagtgggttcccagcgcttcgcgcgccagttgggcggcgaagattgcctcttcggcggttttcgccccggaggtattgggcagcagcgtgacgcccgcttcaatcagcggcgccaggatagcgtcgttgtgctgacgtaaatccacgcgcttcatcgccagtgtcaccaactggctgccggaggcgcgaattgcctcgaccatcagttgcgatgaggcaaacttcccggtaccggtgaacagatgtgaatcaaacgttttgtcggcaatacgtaacatatcaaccccctgcaataacctgaaaaaacaggatctggtcgccttcctgcacgatttgctgctgccactgctcgcgcggcaggatctgctgattgagcgccagcgccgcgcccggtttaagctgattgagttgcgtgagcagctcactgacggtttgccctgcggcgcactgcatcggttcatcattgaactgaatctgcatgttgccctccgcagaccggacagccgctggcatgacgcagcgccaggctgcgccactggctggttttgccgtcaaacaggcgtagctctccgctgggcgtctcaataccgctgagtaatttgattgcctccagcgcctgcaaggtgcccatcacgccaacaaccggtccgacgataccggcggtacggcagttgcgttcaggctcgacatcgtccggccacaggcagcggtaacagccttgttcccacggtggtgtgaggaccattagctggccgccaaagccgacggcgctggcggaaattaacggagtgttgagcgccacacaggcggcgttaatctcctggcgcgtcgccatgttatcggtacagtcgagcactacgtcggcgtgtgctaccgcgtttttaagcacatcgccagtcagacgttgttgcaatacgatcagcttgctaccggggttgagctgcgccagccgtagttttgccgcctgcgccttcgggtgggcgatatcgtcggtggtgaacagaatttgccgctggagattgctcaagtgaacatcgtcatcgtctaccagcgttagtttgccgatgcctgctcccgccagatacagcgcggcaggcgaacccaatccgcctaagccgacaatcaatacatggctattgagcaacttttgctggccttcaatcgcgatatcgccgagcaggatctggcggctataacgcataaaatcatggtcattcatcgccgactcctgcgattgccagcagctctgcagtggcttcacgccagtctgcggcctgagtaatagcgctgaccacggcaatgctgccgacgccggtcgccagtaccgccggagcgcgttcaaggctgatgccgccaattgccacggtcgggtaatccgccagtcgttcaatatgactggccagctgcgccagcccctgcggggcggaaggcatctgcttggtttgcgtggggaagacatgacccagcgcgatataagaaggcttagcggcgagcgcgacgtctatctccatatcatcgtgggtcgatacgcccaggcgtaagcccgccgcttgaatcgctttcaggtcggtggtttcaaggtcttcctggcccagatgcacgccgtaagcgcggtgcttaattgccagacgccagtaatcgttgataaacagccgggcgttataacgacgccccagcgcgatggcggcgataacgtcggcttccacctcttcatcgcgtttatctttgatacgcaactggatcgtgcgcacgcccgactccagtaaacgctcaatccattcaacgctgtccaccaccgggtaaagcccgaggcggaacggcacggtggggaaatcaggctgatacatcaggcttcctcccgcttgagataaatttcgccgcctttggcgcggaagtcctctgacatatccgccatgccgatttcaatagtttgtgcggcggcgtagtcgcggacctcctggctgattttcatcgagcagaacttcggcccgcacatggagcagaagtgggcaaccttgccggactcctgcggcagggtttcatcgtgataagcgcgggcggtgaacgggtcgagcgcgaggttaaactgatcttcccagcggaattcaaagcgcgctttcgacatggcgttatcgcggatctgcgcgcccggatgtcctttggctaaatccgcggcgtgggcggcgattttgtaggtgattagcccctgcttcacatcttctttgttcggcaggccgaggtgttctttcggcgtcacataacacagcatcgcgcagccaaaccagccgatcatcgcggcaccgatcccggaggtgaagtggtcatagcccggcgcgatatcggtggtcaatggccctaaggtgtagaacggtgcttcatggcagctctccagctcttcggtcatgttgcgctggatcatatgcatgggtacgtggcccgggccttcaatcatcacctgcacgtcgtattcccaggcgattttggtcaattcgcccagcgtatgcagctcggagaactgcgcttcgtcgttggcatcctgaatggagccggggcgcaggccgtcgcccagcgacaaggagacgtcgtaggcggcgcaaatttcacaaatctcgcggaaatgttcgaacaggaagttctctttgtgatgggagagacaccactttgccatgatggaaccgccgcgtgagacaatcccggtcaggcgtttggcggtcattggcacgttgcgcagcagcacgcccgcgtgaatggtgaagtagtcgacgccctgttcagcctgctccagtagcgtgtcgcggaacgcttcccaggtaagatcttcggcgatcccgttgaccttctccagcgcctggtagatcgggacggtgccgatcggtaccgggctgttacgcaggatccattcgcgggtttcatgaatatagcgaccggtggagaggtccatcaccgtgtccgcgccccagcgggttgaccacaccagtttttccacctcttcttcgatggaggaggtgaccgccgagttaccgatgttggcattcactttgaccaggaagttgcggccgataatcatcggctccgattccgggtggttgatgttggcgggaataatcgcgcggcccgcggcgacttcatcacgcacgaattccggcgtaatgttttccggcaggcgcgcgccaaagttcatccccggatgctggtggcgcagcacttcactgcgaatgcgctcacggcccatattttcacggatggcgatgaactccatttcgggagtgacgatccccttgcgggcgtagtgtaactgggtgacgcgcttgcccgctttagcgcgttttggcgtcagcaggccggtaaaacgcagatcgtccaggccatcgtcggccagacgttctctggtataagccgagctacggtcgtctaattcttcgctatcgttacgtgcgtcaatccatggctggcgcagtttcgccagaccctgctggacgttaatcgccacctcaggatcgccataggggccggaggtgtcgtataccggtacggcttcgttctcttcaaactgcgggttgtctttactgccgccgatgagcgtggggctaagttgaatttcgcgcatcggtacgcgaatatcatgctgcgaaccggtcacgtagatgcgtttcgagttgggaaacgcggtgccttccagcgtatcgataaaatgctgggctttagcgcgctgctcgcggcgggttaacgttgttgtagacatagctcattccaaaaaattaaggacgtggcttgtcagacgacggatggagtaatggatgtgcgccgcccgtaaaggcagcagcataaagcagaattactcttgttcccttcgcaggtattaacctgatcaggttccgcggatcccgaattaacggtctcagccttttccacttcatccttcgcgctgcctcttcgttggcttcgtccgctcactccagtcacttacttatgtaagctcctggagattcaccgacttgccgccttgacgcatcacgaacgcttttgtggaaaattagcactccgacaagataaccgcccctccgaagagggggctgaagtaaactacccgttactcgcgcagaactcaagcgggacgtttgactctggcgccgtcgtgcatcgcgtcaaacaccagcataatcagcttgtcttccagcacaaagcgggcttccagcgcttcgccgatatctgacagagcttgttgaaattcgagacaattatcgtgatcgatggcagtttccaggctggtgtcgtaataatccataatgcgctgcgtattatcttccagcagcggccagatttttgccgcatgtaaaagctgaccgtttccttccaatttatggagaatacgttcataaatactgaagtgcccggcggaaaggtaatcgaccaggctctgacaaaaatcatccagcgctttttcattcagccgcatgtacgattctttgccaggcttaatgccaaccagattgtagtaagccacgagcaggtgcttacgtacatccagccagcgatcgaccagtttgttgcttccgccaacgcgctccgtcaggttttccagctggtttagcatgattgtctccgcaagttagataaaggctgctcgccatgaatgtaaaaataatgttaacaacatgccagtgaagcaaaggtagtgcaatagctatggatcgtataattgaaaaattagagagtggctggtggatcgtcagccatgaacaaaaattatggttgccgtatggggaattaccacacgggctggcggcaaatttcgatcttgtggggcagcgcgcactccggataggtgaatggcaaggcgagcccgtttggctggtgttacagcatcgacgtcatgatatgggatcggttcgccaggttatcgatcaggaggccgggttgttccaactggcgggacgtggcgtacagttggcggagttttatcgttcgcataaattttgcggctattgcgggcaccctatgcacccgagtaaaaccgaatgggcgatgctgtgcagccattgccgcgagcgttactacccgcaaatcgccccctgcattattgttgccattcgccgtgaggattccatcctgctggcccagcacgttcgccaccgcaacggcgtgcataccgtgctggccgggtttgttgaagtcggcgaaaccttagaacaggcggtcgcgcgagaggtaatggaggagagcgggattaaggtgaaaaatctgcgctatgtgacttcccagccgtggcctttcccgcagtcgttgatgaccgcttttatggcggagtatgacagcggcgagattgtcatcgacccgaaagaactgttggaagcaaattggtaccgttatgacgatctgccgctactaccgccaccgggcaccgtcgcgcgccgtttgatcgaagatacggtggcaatgtgtcgggctgaatatgattgacatgttacactgggcgcatcaacgctaaaggaatgtaaaaatgaccgaactcaaaaacgatcgttatctacgtgcgctgctgcgccagcccgttgatgttacgccagtgtggatgatgcgccaggcgggccgttatctaccggagtacaaagccactcgcgctcaggcgggcgattttatgtcgctgtgcaaaaatgccgaactggcctgcgaggtcactttacagccgctgcgccgttatccgcttgatgcggcgatccttttctcggatatcctgacgattccggacgcgatgggcctggggctctattttgaagctggggaaggcccgcgctttacagcccctgtcacctgcaaagccgacgttgaaaaactgccgattccggatccagaaggtgaactgggctacgtgatgaatgcggtgcgtacgattcgccgcgaactaaaaggcgaggttcctctgatcggcttctccggcagcccgtggacgctggcgacttacatggtggaaggcggcagtagcaaagccttcacggtgattaaaaagatgatgtacgctgacccgcaggcgttgcatctgctgctggataagttggcgaaaagcgtcacgctgtacctcaacgcgcagattaaagcgggtgcgcagtcggtgatgattttcgatacctggggcggcgtgctgactggccgcgattaccagcaattctccctctactacatgcataaaatcgtcgatggcctgctgcgtgaaaacgacggtcgccgggtgccggtaacgctgttcactaaaggtggcggtcagtggctggaggcgatggcggaaaccggctgcgacgcgctgggtctcgactggacgacagatatcgccgatgcgcgccgtcgcgttggccataaagtggcgctgcagggcaatatggacccctcgatgctgtatgcgccgccggcacggatcgaagacgaagtagcgactatacttgctggtttcggtcagggagaagggcacgtctttaaccttggacatggcatccatcaggatgtgccgccagaacatgctggcgcatttgtggaggcagtgcaccgactttctgcgcagtatcacaactaaggagttagcatggatctcgcgtcgctacgcgctcaacagatagaacttgcttcatcggtttgccgcgaagatcggttggacaaagatccgccagcgtttatcggcggggcggacgtcggttttgagcagggcggcgaggtgacgcgggcggcgatggtattgctgaaatatccgtcgcttgaactggtagagtacaaggtggcgcgtattgccaccaccatgccgtatatccccggctttctctcttttcgtgaatatcctgcgctgctggcggcgtgggaacagctctcgcaaaagcccgatttgctgtttgtggacggtcacggtatttcgcatccgcgtcggcttggcgtcgccagtcattttggactgttggtggacgtgccgaccatcggcgtggcgaaaaaacggctatgcggtaaatttgaaccactttccgccgaacctggcgcacttagccccttaatggataaaggcgagcaactggcgtgggtatggcgcagcaaggcgcgctgtaatccgctgtttatcgcgacagggcaccgggtcagtactgacagcgcgctggcgtgggtacagcgctgtatgaaagggtatcgcctgccggagccgacgcgctgggcggatgccgtcgcttccgggcgtccggcgtttgttcgttggcaagaaattcagcgctgattcaggtaaactgccgctaatttccgattcgagattccatcatgttacaaaacccgattcatttgcgtctggagcggctggaaagctggcagcacgttacctttatggcctgcttgtgcgagcgcatgtacccgaactacgccatgttttgcaagcagacggaattcggcgacggacagatctaccgtcgcattctggatctgatctgggaaaccctgacggtgaaagatgcgaaggtcaatttcgatagccaactggagaagtttgaagaggcgattccggcagccgacgactatgatttgtacggcgtttacccggcgattgatgcctgcgtcgcattaagcgaattaatgcattctcgtcttagcggcgaaacgctggaacacgctattgaggttagtaagacttccattactacggtagcgatgttggaaatgactcaggctggtcgggaaatgaccgatgaggagctcaaaacgaaccctgccgttgaacaggaatgggatattcagtgggaaatattccgacttttagccgactgcgaagaacgtgatattgaactgataaaagggctcagggcagacctgcgcgaggctggcgagagcaatatcggtataaattttcagcaatgacaccagaaaacgtgatttaacgtctgatttgtcgtgccataaggcttcccttatgccccccgtctggtctacatttgggaggcgaaaaaaagtggctatcggtgcgtgtatgcaggagagtgcttttctggcatttccgtcgcactcgatgcttagcaagcgataaacacattgtaaggataacttatgaacaagactcaactgattgatgtaattgcagacaaagcagaactgtccaaaacccaggctaaagctgctctggaatccactctggctgctattactgagtctctgaaagaaggcgatgctgtacaactggttggtttcggtaccttcaaagtgaaccaccgtgctgagcgcactggccgtaacccacagaccggtaaagaaatcaaaatcgccgccgctaacgtaccggcgtttgtttctggtaaagctctgaaagacgcagttaagtaagacgcataactgtgaacagttttatcgaaggggctcatcagccccttttgtctgtctggcgtcgcgcgtttctgttttctggcgcgctgttgctgactgcctgcagtcataacgcttcaccgcctccgtttactgccagcggctttgccggcgatcacggcgcggtgcgtatctggcgtaaagatacgaacgatgaagtccatctgctttctgtttttagcccgtggcatagcggcagcacgacgaccagcgaatatcgttggcagggtgatacgctttcgcttattgaactcaatatttacagcaaaccgccagaacatattcgcgcgcgtttcgacgctcatggcgaactcagttttatgcagcgtgaagtcggggggcagaagcagcagctttccaacgatcagattgccttgtatcgctatcgcgccgaacaaatccgtcagaccagcgacgccttgcgcctggggcgggtcatactacgccagggacgctggcacgccgaccatacggtaaccacctgtgaaggtgaaacgctgaaaccggatctggattcctgggcaataagccacattgagcgccgccagaaccactcatcggtagaggtgagcgtagcatggctggaggcgccggaaggatcgcaacttttgctggtggcgaattcagatttttgtcactggcagccgcaagcgaaaagcttttgatggaataccggatggcgaagccgccattcggcaaacatgctttaccagtttcccatacccatgtgaccgccgccgcgatgataaccgccgccatagccgccgcaaccgccatagcccattcctgcgccgcgtggtatgccagcctgcgccatcgcgacatcccgtttcacgcgttgctcatctaacttctggcctaatgactccatctctttggcaaccgcgttaattttcgcagtatccggcgaactggcggtcagtagcgcgttgtattcataacgtttggatatcagttgctggcgcagcgcgctggtctgcgtatagtaatcatcataaatcttctgcgccgtcgcctgctgttccgtagttaacgggctacctccctgttgccacataccgtcattgttgccccagtgatgcccggcgaaggcggcgccggagctcagggccaaaagagagagggcaattagcgcgatagctgatttattgttccgtttcattttgcgttctcctgttgctcatcttatcctctctcttgcatcttccgtgccaggtaactattccttgtcgggcagcgagttaacccgcttcaggcggcaaaaagcgagtaaaaatgactcgcataacccgcctggcgagtcatttttacccatccgtatccgaaagggtgtgcgacaacgcgcggttatgcggagcgaagaatggcatgatctctgcttaagtaaggaaaataaaaacgagccggggaagcctgtgagttttatacgattacataaagatgccgctgcaacgtggttgagtcgactgttacctgcggcgatcttcattctggtggggctattttccattatggtcattcgcgactatggccgtgagagcgctgccgccaggcagacgctgctggaaaagggaaatgtactcattcgcgctctggagtccggcacgcgagtaggtatgggaatgcggatgcatcacgcgcagcagcagacattgctggaagagatggcgggtcagccaggcgtgttgtggttcgccgtaacggatgcgcagggggtaatcatcactcatagcaaccctggcatggtgggcaaatcgctctattccccatctgaaatgcatcaactaaaccccgggccgcaggagcgttggcggcgtgtcgacgttgctgctaacggcgagacggtgcctgcgctggaaatttaccgtcagttccagccgcttttcggtatgagaggtcacggtatgagggggcacggcatggcgcgtagcgccaatgacgacgaaccagcgaaacaaactatttttattgcctttgacgccagcgagctggccgcgacacaggcaagggagtggcgtaatacgctgattgttttgtctgcgttagcggcggtgctgttggcaacgttactggcgtttttttggcatcagcgttatcagcgctcgcacagagaactgcttgatgcaatgaagcgtaaagaaaagctggtggcgatggggcatctggcggcgggcgtcgcgcacgaaattcgtaacccgctctcgtccatcaaagggctggcgaaatactttgccgagcgcacgcctgccggcggcgagtcgcatgaactggcgcaggtgatggccaaagaggccgaccgtttgaaccgggtggtaagcgaattgctcgaactggtaaagcccgcgcatctgacgctccagacggttaacctcaatgatattattactcactccctgaatctggtcagtcaggatgcccaaagcagagagattcagttgagattcacggcgaatgagacgcttaagcgtattcaggctgacccggacaggctgactcaggtgctgttgaatctgtacctgaacgctattcatgcgattggccgccagggaacgattagcgtagaggcaaaagaaagtgggaccgaccgcgttatcatcactgttaccgatagcgggaaagggatcgccccggatcagctggaggcgatttttacgccttattttacgaccaaagctgacgggacaggcctggggctggctgtggtgcaaaatatcatcgaacagcatggcggcgcgattaaggtgaaaagtattgagggtaaaggcgcggtctttactatctggttgccagtgatagcgagacaacaggattaacaagggtgatacgcggaaaaatcgatattctggttgtggatgatgatgtaagccactgcacgattttacaggcgctgcttcggggctggggctataacgtcgctctggcctacagtgggcatgatgcgttggctcaggtgcgtgagaaagtctttgatctggtactgtgcgatgtgcgtatggcggagatggacggtatcgccacgctgaaggagattaaagcgctcaatcccgccattccgattttgattatgacggcattttccagcgtggaaacggcggtagaggcgttgaaagccggcgcgctcgactatttaattaaaccgctggattttgaccgtctgcaggagacgctggaaaaggcgttggcgcatacgcgggaaacgggcgctgaattgccatcggcgtcggctgcgcagtttggcatgattggcagcagtccggcgatgcaacatttactgaatgaaatcgcgatggtcgcaccatcagacgccacggtattgattcacggagactccggcacgggtaaagagctggtggcgcgggcgctacacgcctgtagcgccaggagcgatagaccgctggtcacgctcaactgcgccgcgcttaatgaatcgctgctggagtccgagctgttcggacacgaaaaaggcgcgtttaccggcgcggataaacgtcgggagggacgctttgtcgaagctgacggcgggacattgtttcttgatgaaatcggcgatatctcgccgttaatgcaggtacgtttgctgcgggcgattcaggagcgcgaagtgcaacgcgtgggaagtaaccagacgatatctgtggatgttcggttaattgccgctacccaccgcgacctggcggaagaggtgagtgccggtcgctttcgccaggatctctattaccgcctgaatgtggtggcgattgaaatgccttctttgcgccagcgtcgggaagatattccgctactagcagaccattttctgcggcgttttgccgaacgtaaccgcaaagtggtgaaggggtttacgccgcaggcgatggatctgctgatccactacgactggccgggcaatatccgtgagctggaaaacgctatcgagcgggcggtggtgttgctgacgggagaatacatttctgaacgcgaattgcctctcgctattgccgcgacgccgataaaaacggaatacagtggtgagatccaaccgctggtggacgttgaaaaagaggtgattctggcggcactggaaaaaacgggcggcaacaaaacggaagccgcccgtcaattgggcattacgcgcaaaacgctgctggctaaactcagccgttagttttgctcacgctcaatggcgcgccagccaatgtcgttacggctgaagctgccgtcccagcggatgtcggtcatcagggcgtaagcgcgtttctgcgcctcagccacggtgtggcccagcgcggtggcgcacagtacgcggccgccgctggtcaacacgcggtcgtcatcggcgagtttggtgcccgcgtggaaaactttaccgtcagccacttcttccagcggcaggccgtggatctcgtcgccggtgctgtagctgcccggataaccgcccgcggcgatcaccacgcctaatgaagcgcgttcgtcccactcggaggttttctcatccagcttgccgtcgcaggcggccaggcaaagatccaccaggtccgacttcatgcgtagcatgatcggctgggtttccggatcgccgaagcggcagttgaactcgataactttcgggttgccctgcttgtcgatcatcagacccgcgtacaggaagccggtataggtattcccttctgccgccatgcctttcacggttggccagatgatccgttccatggtgcgctggtggacttcatcggtcaccactggagccggagagtaagcccccatgccgccggtgttcgggccggtatcgccgttgcctacgcgtttgtgatcctggctggtggccatcggcagcacgtgctcgccgtcgaccatcacgataaagcttgcctcttcgccgtcgaggaactcctcaatcacgatacggtggcccgcgtcgccaaaggcgttgcctgccagcatgtcatgaacggcggcttcggcttcttccagcgtcatcgccacgataacgcctttaccggcagccagaccgtcagctttgatgacgatcggcgcgcctttctcacgcagataagccagggctggctcaatctcggtgaaattctggtattccgccgtcggaatctggtgacgagcgaggaaatctttggtgaaggctttggagccttccagttgggcggccccttcggttgggccaaagatcttcagacccgccgcgcggaacgcatcgaccacgccaatcaccagcggcgcttccgggccaacgatggtcaggtcaatcttctcgtgctgggcaaagctcagcagcgccggaatatcggtgacgccgatagccacgttctgcaacgcgggctccagcgcggtaccggcgttacccggtgcgacaaaaacagtatcaaccagcggcgactgtgcggctttccaggccagcgcgtgttcgcgtccgccgttaccaatcactaatactttcatgtttcgctccattaatggcggaagtggcgcatgtcagtgaagatcatcgcaataccgtgttcgtcggcagcggcaatcacttcgtcatcacggatagaaccgccaggctggatcacacagctcacgccaacggcggcagcggcatcaataccgtcacggaacgggaagaacgcgtcggaggccatcgcggaacctttcacttccagaccttcgtcagccgctttaatgccagcgattttcgcggagtacacgcggctcatctggcctgcgcctataccgatagtcatgttctctttcgcatacacaatggcgttggatttcacgaacttggcgaccttccagcagaacagcgcatcgcgcagctcctgctcggtcggctggcgtttagagaccacgcgcagttcagcttcgctcaccatacccagatccctgtcctgaaccagcaggccgccgttaacacgcttgaagtccagacccggcacacgctgtgcccactgaccgcaggtcagaacgcgaacgttctgtttggcggcggtgattttcagcgcctcttcggttgcggacggggcgatgatcacttccacgaactggcgggagataatggcctgcgcggtttcggcatccagttcgcggttgaaggcgataatgccgccgaacgcggaggttgggtcggttttatacgcacggtcgtaagcgtcgagaatagtggtgctcaccgccacgccgcacgggttagcgtgcttgacgattacgcaggctggctcgttgaactctttcacacactccagcgccgcgtcggtatcagcgatgttgttgtaagaaagcgctttgccctgaacctgctgtgcggtggcaacggacgcttctttcacattttcttctatatagaaggctgcctgctggtggctgttctcgccatagcgcatatcctgcttcttaatgaagttcagattcagcgtacgcgggaagcgaccggcggcttctttgctttcaccgtggtaggccggaaccatgctgccgaagtagttagcgatcatgctgtcgtaggcggcggtgtgttcgaaggctttaatcgcgagatcgaaacgggtgtcgagggtcagagaaccttcgttagcatccatctctttaataatggcgtcgtagtcgctgctcttcaccacgatggccacgtctttatggttcttagcagcagagcgcaccatggtcgggccgccgatatcaatgttctctaccgcatcttccagcgagcagccttcgcgtgccacggtctcggcgaacggatacaggttaacgacaaccatatcgataggggcgatgtggtgctgttccataatggcatcgtcctggccgcgacgaccgaggatgccgccgtggacttttggatgcagggtctttacgcgtccatccatcatttccgggaaaccggtgtaatcggaaacttcggtcaccggcaggcctttttctgctaacaggcgggcggtgccccccgtagacagcagctccacaccgcgtgcggaaagtgcctgggcgaattcgatgataccggccttgtcagaaacactgagcagagcgcggcggactggacgacgttgttgcatggtaaatcccctggatttgacgattacagagagcgttagctgaatttttcgtgaaaaactcagctaacgccccttatggggtattctcattttgcggcgacattgtaacgaaaacgtttgcgcaacgctcgcgaatttttctttttaaattctggccccgcttttatccctgaaagatcatttgcagagtgagaagatccaggagatgaacgcgcattttgtggataagtctgtgcgtaaatgggtataaccaggggttttgctggggaatgcagcaaacagtcatttttctgcaatttttctattgcggtcagcagagaactccctataatgcgcctccatcgacacggcggatgtgaatcacttcacacaaacagccggtcggttgaagagaaaaatcctgaaattcagggttgactctgaaagaggaaagcgtaatatacgccacctcgcaacggtgagcgaaagccgcgttgcactgctctttaacaatttatcagacaatctgtgtgggcactcgaagatacggattcttgacgtcgcaagacgaaaaatgaataccaagtctcaagagtgaacacgtaattcattacgaagtttaattcattgagcatcaaacttttaaattgaagagtttgatcatggctcagattgaacgctggcggcaggcctaacacatgcaagtcgaacggtaacaggaagcagcttgctgcttcgctgacgagtggcggacgggtgagtaatgtctgggaaactgcctgatggagggggataactactggaaacggtggctaataccgcataacgtcgcaagaccaaagagggggaccttcgggcctcttgccatcagatgtgcccagatgggattagcttgttggtgaggtaacggctcaccaaggcgacgatccctagctggtctgagaggatgaccagccacactggaactgagacacggtccagactcctacgggaggcagcagtggggaatattgcacaatgggcgcaagcctgatgcagccatgccgcgtgtatgaagaaggccttcgggttgtaaagtactttcagcggggaggaaggtgttgtggttaataaccgcagcaattgacgttacccgcagaagaagcaccggctaactccgtgccagcagccgcggtaatacggagggtgcaagcgttaatcggaattactgggcgtaaagcgcacgcaggcggtctgtcaagtcggatgtgaaatccccgggctcaacctgggaactgcattcgaaactggcaggcttgagtcttgtagaggggggtagaattccaggtgtagcggtgaaatgcgtagagatctggaggaataccggtggcgaaggcggccccctggacaaagactgacgctcaggtgcgaaagcgtggggagcaaacaggattagataccctggtagtccacgccgtaaacgatgtctacttggaggttgtgcccttgaggcgtggcttccggagctaacgcgttaagtagaccgcctggggagtacggccgcaaggttaaaactcaaatgaattgacgggggcccgcacaagcggtggagcatgtggtttaattcgatgcaacgcgaagaaccttacctggtcttgacatccacagaagaatccagagatggatttgtgccttcgggaactgtgagacaggtgctgcatggctgtcgtcagctcgtgttgtgaaatgttgggttaagtcccgcaacgagcgcaacccttatcctttgttgccagcgattaggtcgggaactcaaaggagactgccagtgataaactggaggaaggtggggatgacgtcaagtcatcatggcccttacgaccagggctacacacgtgctacaatggcgcatacaaagagaagcgacctcgcgagagcaagcggacctcataaagtgcgtcgtagtccggattggagtctgcaactcgactccatgaagtcggaatcgctagtaatcgtggatcagaatgccacggtgaatacgttcccgggccttgtacacaccgcccgtcacaccatgggagtgggttgcaaaagaagtaggtagcttaaccttcgggagggcgcttaccactttgtgattcatgactggggtgaagtcgtaacaaggtaaccgtaggggaacctgcggttggatcacctccttaccttaaagaactgttctttgcagtgctcacacagattgtctgatgaaaagtaaatagcaaggcgtcttgcgaagcagactgatacgtccccttcgtctagaggcccaggacaccgccctttcacggcggtaacaggggttcgaatcccctaggggacgccacttgctggtttgtgagtgaaagtcacctgccttaatatctcaaaactgacttacgagtcacgtttgagatatttgctctttaaaaatctggatcaagctgaaaattgaaacacagaacaacgaaagttgttcgtgagtctctcaaattttcgcaacacgacgatgaatcgaaagaaacatcttcgggttgtgaggttaagcgactaagcgtacacggtggatgccctggcagtcagaggcgatgaagggcgtgctaatctgcgataagcgccggtaaggtgatatgaaccgttataaccggcgatttccgaatggggaaacccagtgtgattcgtcacactatcattaactgaatccataggttaatgaggcgaaccgggggaactgaaacatctaagtaccccgaggaaaagaaatcaaccgagattcccccagtagcggcgagcgaacggggaggagcccagagcctgaatcagcatgtgtgttagtggaagcgtctggaaaggcgcgcgatacagggtgacagccccgtacacaaaagcgcatgtgctgtgagctcgatgagtagggcgggacacgtggtatcctgtctgaatatggggggaccatcctccaaggctaaatactcctgactgaccgatagtgaaccagtaccgtgagggaaaggcgaaaagaaccccggcgaggggagtgaaaaagaacctgaaaccgtgtacgtacaagcagtgggagcacccttcggggtgtgactgcgtaccttttgtataatgggtcagcgacttatattctgtagcaaggttaaccgtataggggagccggagggaaaccgagtcttaattgggcgttaagttgcagggtatagacccgaaacccggtgatctagccatgggcaggttgaaggttgggtaacactaactggaggaccgaaccgactaatgttgaaaaattagcggatgacctgtggctgggggtgaaaggccaatcaaaccgggagatagctggttctccccgaaagctatttaggtagcgcctcgtgaattcatctccgggggtagagcactgtttcggctagggggccatcccggcttaccaacccgatgcaaactgcgaataccggagaatgttatcacgggagacacacggcgggtgctaacgtccgtcgtgaagagggaaacaacccagaccgccagctaaggtcccaaagtcatggttaagtgggaaacgatgtgggaaggcccagacagccaggatgttggcttagaagcagccatcatttaaagaaagcgtaatagctcactggtcgagtcggcctgcgcggaagatgtaacggggctaaaccatgcaccgaagctgcggcagcgaacgtatcacccaagacaactttacggagttgacgattgacggagcgaagcgacgtcaaagcgttcattaaagtcgagttggcttagggatacgttcgttgggtaggggagcgttctgtaagcctgtgaaggtgtgtcgtgaggcatgctggaggtatcagaagtgcgaatgctgacataagtaacgataaagcgggtgaaaagcccgctcgccggaagaccaagggttcctgtccaacgttaatcggggcagggtgagtcgacccctaaggcgaggccgaaaggcgtagtcgatgggaaacgggttaatattcccgtacttggtgttactgcgaaggggggacggagaaggctatgttggccgggcgacggttgtcccggtttaagcgtgtaggtgtgtgttccaggtaaatccggttcactttaacactgaggcgtgacgacgaggcactacggtgctgaagcaacaaatgccctgcttccaggaaaagcctctaagcatcaggtaacacgaaatcgtaccccaaaccgacacaggtggtcaggtagagaataccaaggcgcttgagagaactcgggtgaaggaactaggcaaaatggtgccgtaacttcgggagaaggcacgctgacacgtaggtgaagtgatttactcatggagctgaagtcagtcgaagataccagctggctgcaactgtttattaaaaacacagcactgtgcaaacacgaaagtggacgtatacggtgtgacgcctgcccggtgccggaaggttaattgatggggtcagcgtaagcgaagctcctgatcgaagccccggtaaacggcggccgtaactataacggtcctaaggtagcgaaattccttgtcgggtaagttccgacctgcacgaatggcgtaatgatggccaggctgtctccacccgagactcagtgaaattgaactcgctgtgaagatgcagtgtacccgcggcaagacggaaagaccccgtgaacctttactatagcttgacactgaacattgagccttgatgtgtaggataggtgggaggctttgaagtgtggacgccagtctgcatggagccgaccttgaaataccaccctttaatgtttgatgttctaacgtggacccgtaatccgggttgcggacagtgtctggtgggtagtttgactggggcggtctcctcctaaagagtaacggaggagcacgaaggttggctaatcctggtcggacatcaggaggttagtgcaatggcataagccagcttgactgcgagcgtgacggcgcgagcaggtgcgaaagcaggtcatagtgatccggtggttctgaatggaagggccatcgctcaacggataaaaggtactccggggataacaggctgataccgcccaagagttcatatcgacggcggtgtttggcacctcgatgtcggctcatcacatcctggggctgaagtaggtcccaagggtatggctgttcgccatttaaagtggtacgcgagctgggtttagaacgtcgtgagacagttcggtccctatctgccgtgggcgctggagaactgaggggggctgctcctagtacgagaggaccggagtggacgcatcactggtgttcgggttgtcatgccaatggcactgcccggtagctaaatgcggaagagataagtgctgaaagcatctaagcacgaaacttgccccgagatgagttctccctgagacttagagtctcctgaaggaacgttgaagacgacgacgttgataggccgggtgtgtaagcgcagcgatgcgttgagctaaccggtactaatgaaccgtgaggcttaaccttacaacgccgaagatgttttggcggttaagagaagattttcagcactgattccggattttcgggaacgaaagattttacgctgaggcaaggcggcaaatgaaggaaaggaaggagcatacagaagtatgtgactgactttgcgaatgcagccaacgcagcatcggtgtaaaagattcgtttctggcaacagaatttgcctggcggccgtagcgcggtggtcccacctgaccccatgccgaactcagaagtgaaacgccgtagcgccgatggtagtgtggggtctccccatgcgagagtagggaactgccaggcatcaaattaagcaaaaggctcagtcgaaagactgggccttttgttttatctgtggtctgtcggtgagcactctcctgaggaggagaaatccgccgggagcggatttgaacgttgcgcagcaacggcccggagggtggcgggcaggacgcccgccataaactgccaggcatcaaacaagtgaagaagcccgtccgtcaggacgggcttttttgcgtgtgcggtaactgtaaaaatgtaggcctgataagcgcagcgccatcaggcaacctgcaccgccggatggccgcttcgccttatccggcctacatgcacttatcagacagcgccgctactcacggataaattaaattcaataatggatacggtttcccaagatcgtcgacctccgaacgtcccgtcaccttgaatcccattttcttataaaatccaacagcttgtgtattttgctcgttaacattggttgtcaatcccggcgccagtgttaacgcatgttcaaccagaatcttaccgataccctgaccgcgcacgtccggatctataaacagagcatccatatgctcaccggtaagcagcataaaccctaccggctcatcctgatcggtcacggcaacccatagtggcgcttctggcagaaaatcgctcaccagttcttccagttcggcccgataagcgtttgacagaaaatcgtgcgtggcatcgactgagcgacgccagatcgcaatcagtttttccccttcctcatgccttgaacggcgaatgttaatcatcatcttcactccttttttgcttacttctattctaatgcaaatgctgtcgtgaaactttctcaccttgaacttgcagactcgacattcgcctgatttctgagtatcttcagctatctggatgtctaaacgtttaaacgtatgtcgtgaggttatcaggttatgccgattcgcgtgctggacgagctacccgccgtcaattttttacgtgaggagaatgtcttcgtcatgacgacttctcgcgcatcaggtcaggaaattcgcccgctaaaggtacttatccttaacctgatgccgaagaagattgaaacggaaaatcagtttctgcgtttgctatcgaactcgccattgcaggtcgatattcaactactgcggatagatgcccgcgagtcgaggaacacgccagccgagcatctgaacaacttttactgtaacttcgacgatatctgcgatcagaactttgatgggcttatcgtgaccggagcgccgctgggtctggtggagtttaatgacgtggcttactggccgcagattaggcaggtgctggaatgggcgaaagatcacgttacttcgacgctatttgtctgttgggccgttcaggccgcactcaatattctgtatggtatccctaagcagacccgtacagataaactttccggcgtctatgaacatcacatccttcatccacatgctctgttaacgcgtggttttgatgattcgtttctggcgccacactcacgctatgccgatttcccggcggcgctgatacgggattatacggatcttgaaattctggccgaaacagaagaaggggatgcgtacctgtttgccagcaaagataaacgtattgcgtttgtcaccggtcatcctgaatatgacgctcatacgttagcgggtgaatattttcgtgacgttgaggccgggttaaatccggaggttccgtacaactatttcccaaaaaacgatccgcaaaacataccgcgcgcaacctggcgcagccacggtaatttactgtttactaactggctcaactattatgtctaccagattacgccatatgatctgcgtcacatgaatccaaccctggattaatcttctgcttctgacgatcctaaagcgtttcagcatgttgaatcaggcaccttcgggtgccttttttatttccgaaacgcacctcatcatgtaattaaatttaatttatattgttatcaataggttaatgcataattaaattaaaaatggaaattgtttttgattttgaaatttaattgagtagtcttagttgtgttgaacgaaaagtgcacagtgatccttcgttcgcattggggatgtatctggatcaacaacgaggagctgcatgatgaatccacaggcaaccacaactgatgaattaacctttaccaggccgcaaggcgagctggaaaagcaagtcctgaccgctgaagcagtcgagtttttgacggagttagtcacccgttttacgccaaaacgcaataaactcctggctgcccgtatccagcaacagcaggatattgataacggtaagttgcctgattttatttcggaaaccacttccattagagaaagtaattggcagattcgtggtattccggcggatttacaggatcgccgagtagaaattaccgggccggttgaacgtaaaatggtgattaatgccctgaacgcaaatgtgaaagtgtttatggcggattttgaagactcgctggcgccggactggaataaagttattgatggtcaaatcaacctgcgtgatgcggtgaacggcaccattagctataccaacgaagccggaaaaatctatcagctcaagcccgatccggccgtattgatttgtcgtgtacgtggtctacatctgccagaaaaacatgttacctggcggggggaagccattcccggcagcctgtttgattttgctctgtactttttccacaactataaagcgctgctcgctaaaggtagcggcccgtatttttacctgccgaaaacgcaagcctggcaggaggcagcctggtggagcgaagtgttcagctacgccgaagaccgctttaacctgccgcgcggtacgatcaaagcgaccctgttgattgaaacgctgccggctgttttccagatggatgagattcttcatgcgctgcgtgatcatatcgtcggtctcaactgtggtcgctgggattatattttcagctatatcaaaacgttgaaaaatcacccggatcgcgttttgccggacaggcaggtggtaacgatggacaaaccgtttctgagcgcctactcgcgcctgctgatcaaaacctgccacaagcgcggcgcgttcgcgatgggcggtatggcggcgtttatcccgagcaaagacgttgaacgcaacaatcaggtccttgccaaagtgaaagcggataaagcgctggaagcgaacaacggccacgacggcacgtggattgcgcatcctgggttggcggataccgcaatggccgtctttaacgaggtactgggcgagcacaaaaatcagctgttcattacccgtgatgaagatgcgccgattaccgctgaacagttactggagccatgtgaaggcgaacgcacagaagcgggaatgcgcgccaatattcgcgtggcagtgcagtacattgaagcgtggatctccggcaatggctgtgtaccgatttacggtctgatggaggatgccgcgacggcggaaatctcacgaacctctatctggcagtggattcaccatgagaaaacactgagcaatggaaaacccgtaacgaaaacgcttttccgcgaaatgttggcggaagagatgcgggtaatccaggacgaactgggcgagcaccgctacagcagcgggcgcttcgacgatgccgcacgtctgatggagcaaatcaccacctcagatgacttaatcgacttcctcaccctgccgggctatcgcttactggcttaattcaccacataacaatatggagcatctgcacatgaaaacccgtactcaacaaatcgaagaattacagaaagagtggacacaaccgcgctgggaaggcatcacccgcccgtacagcgcggaggaggtggtgaaattacgcggctcggttaacccggaatgcacgctggcgcagctcggcgccgcgaaaatgtggcggctgttgcacggtgaagcgaaaaaaggctatatcaacagccttggcgcgctgaccggcggtcaggcgttgcagcaggcgaaagccggtattgaggcgatttatctttcaggctggcaggtggcggcagatgccaacctggcatccagcatgtatccggatcaatcgttgtacccggcaaactctgttccggcggtagtggatcggatcaacaacacttttcgtcgtgcagatcagatccagtgggcatccggtattgaacccaacgatccgcgctatgtggattacttcctgccgatcgttgctgatgcggaagccggttttggcggcgttctgaatgccttcgaactgatgaaatcgatgattgaagccggtgcagcggccgttcacttcgaagatcagctggcgtcggtgaagaaatgcggccatatgggcggcaaggtgctggtccccacgcaggaggcgattcagaaactggttgctgcgcgtctggccgctgatgtgatgggcgtcccgacgctggtgattgcgcgtaccgatgcggatgcggcagatctgatcacctccgactgcgatccctatgacagcggttttattaccggcgaacgcaccagcgaaggtttctaccgcacccatgcgggcattgagcaggcgatcagccgcggtctggcgtatgccccgtatgccgatctggtatggtgcgaaacctctacgccggatctcgaactggcgcgtcgttttgccgatgctatccacgcgaagtatccgggcaaactgctggcctataactgttcaccatccttcaactggcagaagaatctggacgacaagaccattgccagcttccagcagcagttgtcggacatgggttacaaataccagtttattaccctggcgggcatccacagcatgtggttcaacatgttcgacctggcgcatgcatacgcgcagggcgagggcatgaagcactatgttgagaaggttcaacaacccgagttcgccgcggcgaaagatggctacacctttgtttcccaccagcaggaagtgggtactggttacttcgacaaagtcaccaccattattcagggcggcgcgtcatccgttaccgcgttaacgggttccaccgaagaagcgcagttttgattgatgcccggtggcgctgcgcttaccgggcctacagatagcgtaggccggataagcgaacgcgccatccggcatgacgtggtgccggatgagggaaaaaaatgccgcgtggcctggaattactgattgctcaaaccatcctgcaaggctttgacgcgcagtatggtcgatttctggaagtgacttccggcgcgcagcagcgttttgaacaggccgactggcacgccgtccaacaggcgatgaaaagccgtatccacctctatgatcatcatgtgggtctggtggtggagcaactgcgctgtattaccgatggcaaaagtaccgacgcggatttccttttacgcgttaaagagcattacacccggctgttgccggattacccgcgcttcgagattgcggagagctttttcaactccgtttattgccggttatttgaccaccgctcgttaacacccgagcggttgtttattttcagttcgcaaccggagcgccgcttccgtactatcccgcgcccgctggccaaagacttctttcccgatcacggttgggagccgctgttgatgcgcatactcagtgacttaccgctgcgtctgccctggcagaataaaagccgggatatccgctatattatcgcgcacctgactgaaacactgggcgaggacgcgctacctcgctgccatgtccaggtggcgaacgagttgttttaccgtaataaagcggcctggctggtaggtaaattaaccacacctgacggtacgctgccgtttttattgccgattcatcgcactgatgagggggaactgtttgtcgatacctgcctgaccaccacggcagaagcgagcattgtgtttggttttgcccgctcttattttatggtgtatgcgccgctgcctgccgcgctggttgagtggttgcgtgaaatcctgccgggtaaaaccactgccgaactgtatatggcgattggctgccagaaacatgcgaaaaccgaaagctaccgcgaatatttatgttatctggctgaaagcgatgagaaatttattgaggcgcctggcatccgcggcatggtgatgctggtgtttaccctgccaggtttcgaccgggtatttaaaatcattaaagacaaattcgccccgcagaaagagatgtctgccgcccatgtgcgtgcctgttatcaactggtaaaagagcatgatcgcgtcggtcgtatggcggatacccaggagtttgagaatttcgtgctggataaacggcaaattgatccggcgctgatggcgctgttacgacaagaagcgccagagaagattaccgatcttggggaacatatcgtcattcgccatctctatattgaacgtcgcatggtgccgctcaatatctggctggaacaggtagaaggccagcagttgcgcgatgcgatagaagaatatggtaatgcgattcgccagcttgccgccgctaatattttccccggcgatatgttgtttaaaaactttggcgttacccgtcatggtcgcgtggtgttctacgactacgatgaaatttgctacatgacggaagtgaatttccgcgatattccgccagcgcgttatccggaagacgaactggccagcgaaccctggtatagcgtctcgccaggtgatgttttcccggaggagtttcgccactggctgtgtgccgatccgcgtatcgggccattgtttgaagagatgcatgccgacctgtttcgcgccgattactggcgcgcgctacagacgcgtattaaagaagggcatgtagaagatgtgtatgcctatcgacgtagacagcgctttagcgtgcgttacggcgcgatctcaagtacggcgaactcttcgtaaaccagttccatctccggcgaccaattaccctcgcgctcaaaaaaggcccggtgtgccgcttgccagtacgccaggctaagatcgccttcgccttccagtgcggcgagatcggcgctcatctcgttaaaacggatcagcctgagcgccagcgtgcgtatgacgcacacggcgtcgcctgtgccgttgagcacaatgtgatatgacccgggcgtgacagggggttgctctttctgatagctaaccagcgagctacaggtgccacgctttttaccggcgaccactagcgccgccagctcgtcggccagcgccggcgaatcaccgaaagaccaacagaaggcctgtgggtacttctcctgccagtataatttcaggctgctcatttcagcgagttccaccataggccagcgttacctctttcgccgctttaatcaccatggcgccaagttcggtgacgcgatcgtcggtaatgcgtgagcaggggccggaaatagagagggccgcaaacggttcgcggtgttcgtcataaatacacgaggccacgcagcgcagaccgagcgcatgttcttcgtcgtcaaaggaatagccgcgcttgcgtgtttgggcgaggtcatctttcagatgcagcggcgacaccagcgtcgcatgggtataagcgtgcaaccccttgcggtgcagcagactggtaacctgttcctcactgagctgtgataaaaacgccttgcccgcgccagaggcgtgcatgggcagcttgccgccaataggggcggacatgcgcatcaattgtgtgcactgcacctggtcgataataatagcctgatggtcgctctggtcgagtacggcaaggtttaccgtttcgccggagtcctccatcagcttgcgcaaaatcggatggacaatcgccagcagattacggctctgtaagaagctgctaccgacgataaacgcgtgtgcgcctacggcccaatggcccagctcaccaacctggcggacaaaaccctgctgctgcatggtggtgagtagacggtgagtcgtggaattaggcaaacccgcctgttgcgccagttcggtcagcgcgacgctgccgttggactcggcaatccactccagcagcttcagaccgcgagttaatgactgaacctgcccggttacgggtgcagtggtagcggcaggttttctcccgcgtttcgcgggaacaggggcaaccatggcagactcctttttctgtatcgtggaaatcattttcgttttattcaattataatgcaagagttcctgaactgatcggatgagtgacatcacaggatgcccgatagcgctgcgcttatcaggcctacgctttgggagccgccaaagtaatttgtagactgataaggcgcttgcgccgccatccggcaaagcgacagaagtgggtggcaagctgaacatgtctcatgttgcccgttgttctcttttccgccagcacgctttgtgccagtatggctcgttacgtggagcgttgtcgggagcgagtgtgagcagcaaagttgaacaactgcgtgcgcagttaaatgaacgtattctggtgctggacggcggtatgggcactatgatccagagctatcgtctacatgaagaagatttccgcggggagcgctttgccgactggccctgcgacctgaaaggcaacaatgacctgctggtcctcagcaagccggaggtgatcgccgctatccacaacgcctactttgaggctggcgcggatatcatcgaaaccaacacctttaactcgacaaccattgcgatggcggattaccggatggaatccctgtcggcggaaattaactatgcggcggccaaactggcgcgcgcctgcgccgatgaatggacggcgcgaacaccagaaaaaccacgctttgttgcgggcgtgcttggtccaactaaccgcacggcctccatttcgccggacgtcaacgacccggcgtttcgtaatatcaccttcgatcagctggtggcggcctaccgtgaatccaccaaagcgctggtggaaggtggcgcagatctgattctgattgagaccgtttttgacaccctgaatgcgaaagcggcggtgtttgcggtgaaagaagagtttgaagcgctgggcgttgacctgccgatcatgatttccggcaccatcaccgacgcctctggccgtacgctttccggccagactaccgaagccttttataactcgctgcgccacgccgaggcgctcacttttggccttaactgcgcactggggccagatgaactgcgccagtacgtccaggaactgtcgcggattgccgaatgctacgtcaccgcgcacccgaacgccggcctgccgaacgctttcggcgagtatgacctcgacgccgacaccatggcgaaacagattcgcgaatgggcggaagcgggcttcctgaatatcgttggcggctgctgcggcaccacgccggagcatattgcggcgatgagccgcgccgttgccggtttgctgccgcgccagctgccggatatcccggtcgcctgccgcctttccggcctggagccgctgaacattggcgacgatagcctgtttgtgaacgtcggcgaacgtactaacgtcaccggctcggccaaatttaaacggctgatcaaagaagagaaatacagcgaagcgctggatgtcgcccgtcagcaggtagaaagcggcgcgcagattattgatatcaatatggatgaggggatgctcgacgccgaagcggcgatggtgcgtttcctcagcctgattgccggtgagccggacattgcccgtgtaccaatcatgatcgactcctccaaatgggaggttatcgaaaaagggctgaagtgcattcagggtaaaggcatcgtcaactctatttcgatgaaagagggcgtggaagcctttattcatcatgcgaagcttctgcgtcgctacggcgcggcagtggtggtgatggcctttgatgagcaggggcaggccgatacccgcgcgcgtaaaatcgaaatttgccgccgagcctacaaaattctcaccgaagaggtgggtttcccgccggaagacatcatcttcgacccgaatatcttcgccgtggcgaccggtattgaagagcacaacaactacgcgcaggactttatcggcgcttgcgaagacatcaaacgcgagctgccgcacgcgctgatctccggcggcgtgtctaacgtgtccttctcgttccgcggcaacgacccggtacgtgaggctatccacgcggtattcctctactacgccatccgcaacggtatggacatgggcatcgtcaacgccggacagctggctatctacgacgacctgcccgccgagctgcgcgatgcggttgaagatgtcattcttaaccgtcgcgatgacggcactgagcgtttgctggatttggcggagaaataccgcggcagcaaaaccgacgaagctgccaacgcccagcaggcggaatggcgtagctgggacgtgaaaaagcgtctcgaatactcgctggtgaaaggcattaccgaatttatcgaacaggataccgaagaagcccgtcagcaggccgcccgcccgattgaggtgattgaagggccgttgatggacggcatgaacgtggtcggcgacctgttcggcgaagggaaaatgttcctgccgcaggtggtgaaatccgctcgcgtgatgaaacaagcggtggcctacctggagccgtttattgaagccagcaaagaaaaaggctccagcaacggcaagatggtgatcgccaccgtgaagggcgatgtgcacgatattggtaaaaatatcgttggcgtggtgctgcaatgtaacaactacgaaatcgtcgatcttggcgtgatggtgccagcggagaaaatcctcagaacggcgcgtgaagtgaatgccgatctgatcggtctttccgggctgattaccccgtcgctggacgaaatggtcaacgtggcgaaagagatggagcgtcagggctttactatcccgctactgatcggcggcgcaaccacttcgaaagcgcatacggcggtgaaaatcgagcagaactacagcggtccgacggtctacgtgcagaatgcttcgcgtaccgtgggcgtggtggcggcgctactctccgacacccagcgtgatgactttgtcgcccgtacccgcaaagagtacgaaaccgtgcgtattcagcacgcccgcaaaaaaccgcgcacgccgccggtcacgctggaggcggcgcgcgataacgatctggcattcgattgggaacgctacaccccgccggtagcccaccgtctgggcgtgcaggaggtggaagccagcatcgaaactctgcgcaactatatcgactggacgccgttctttatgacctggtcgctggccggcaaatacccgcgcattctggaagatgaggtggtgggcgttgaggcgcagcgtctgtttaaagacgccaatgatatgctggataaactgagcgccgagaaactgttgaatccgcgtggcgtggtgggcctgttcccggcgaaccgtgtgggtgacgacatcgaaatctatcgcgacgaaacccgtactcatgttctgacggtcagccaccacctgcgccagcagaccgagaaagtcggttttgccaactactgtctggcggattttgtcgcgccgaaactgagcggcaaagcggattacatcggtgctttcgcggtgaccggcggtctggaggaggatgcgctggcggacgccttcgaagcgcaacacgacgactataacaagatcatggtgaaagcgattgccgaccgtctggcggaagcgttcgcggaatatctgcatgagcgtgtacgtaaggtttactggggatatgcgccgaacgagagcctgagtaacgacgaattaatccgcgaaaactaccaggggattcgcccggcgccgggttatcctgcctgcccggaacataccgaaaaaggcactatctggcagctactggatgtcgaaaaacacaccgggatgaagctcaccgaatctttcgccatgtggccaggcgcgtcggtctccggctggtacttcagccatcctgagagcaaatacttcgcggtagcgcagatccaacgcgatcaggtgacagattatgctttccgtaaaggaatgagcgttgaggatgttgagcggtggctcgcgccgaacctgggttacgatgcggactgattcataaaatcgtcacttttccttacaacatacaaggcactcattgggtgccttgtctctttcttacaattaaacccttatactgaaggaaggctctacgctgaatttgccggatggcggcgtaaacgccttatccagcataccgtattacgtatggtaagcccggtggcgtgcaacgccagcaggccttaacgctttgcgccatcaggcaatttatcgcaagtgagcttcaggaaaacgtataacgataaggagaacctgacgccgtgttaactttgctccatctactttctgccgttgcgctgttggtatggggaacacatatcgttcgtactggcgtaatgcgcgtgtttggcgcgcgtctacgcactgtcctcagccgcagcgtggaaaagaaaccgctcgccttttgtgcgggtatcggtgttaccgcgctggtacaaagcagtaacgccaccactttattggtaacgtcgtttgtcgcccaggatcttgtcgccctgacgccagctctggtgattgtgctgggcgctgatgtgggtactgcgctaatggcgcgtattctcacctttgatttgtcgtggctgtcgccgctgctgatttttattggcgtgattttctttttgggacgtaagcagtcccgtgccgggcagcttggtcgcgtcggtatcgggcttggcctgattctactggcgctggagctgattgtgcaggcggtgacgccgatcactcaggctaatggcgtgcaggtcattttcgcgtcgctgacgggcgacattatgctggatgcgctgattggcgcgatgttcgctattatcagttattccagcctggcggcggtgttgctgacggcgaccctgacggcggcggggattatatcgttcccggtggcgttgtgcctggtcatcggcgccaatctgggatcggggctgctggcgatgctcaataacagcgccgccaatgctgccgcgcgtcgcgtagcgctcggcagcctattgttcaaattgatcggcagcctggtcatcctgccgtttgtccatccgctggcgaatctgatggatgagctatcgctaccgaaatcagagctggtgatctatttccacgttttctataacctggtgcgctgcctggcgatggtgccatttgccgagctgatggcgcgtttttgtaaacgaattattcgtgatgagcctgaactggatacccatctgaagccgaaacatctggatgtcagcgcgctggatacgccaacgctggcgctggccaatgctgcccgcgaggtgttgcgcattggcgatgcgatggaacagatgatggaagggctaaaaaaggtcatgcacggcgagccgcgtgaagagaaagcgctgcgcaagctggcggatgacgttaacgtgctctacaccgcgattaagctttatctggcgcgaatgccaaaagacgagctggcggcggaggagtcccgccggtgggcggagattattgagatggccctgaacctcgaacaggcgtcggatattatcgagcgaatgggcagtgagattgccgacaagtcgctggcggcgcgtcgggcattttcagaagaaggattgaaagagctggatgcgctttacgatcaactgctcagtaatctgcaactggcgatgtcggtctttttctccggcgatgtcaccagcgcccgtcggttgcgccgcagtaaacatcgcttccgtatacttaatcgccgatactcacatgcgcatgtcgaccgcctgcaccagcagaacgtgcaaagcattgaaaccagctcgctccatttagggctgctgggcgatatgaagcgtcttaactcactgttctgttcggtcgcctatagcgtactggaacagccggatcaggacgaggaacggggcgagtattaagtgaaatgccggatggcggggcctacggagaacatgcgcgtaggcccgtcattcggcattcaatatggcctgggattaaaagcgatgacccgcttccagcgccacggcctcttcgcccgctttaaacacccaggtggtattcgggccgccgagaaccgcctggccgttgctcacctgaatccagttaccttccggcaaaccaatcactgtcagttccggcgcgaccaccagcagttcgcgaatacgctgctcgcgggtctcgcccttatgaccttccggcaaggcgttagtgaagtgaggattaatttgcagcgggaacagatccagcgcgtcgaaaccgtttggatcgacgatcggcatatcgttggtcgtgcggatagtcgggcaggcaaggttggcgcccgcgctccagccgatatacagcgcgccgcgttttaccctgtccgccatcggcgccagcagcccgcgttcacgcgattctttcagtagctggaaggtatttccgccgccgacaataatgatttccgctttctcaatcgccgcaagcggatcggcgacacgatgaatccctgtgacgtttacccctaatggcgcaagcacctctgcggttttatccgtgtactcgtcccatgtttgcgtgacgccggcaaacggaataaacacggctgagcgtcgaccgttcaattgattcgctatcagcggcagagcgtgttccagccaggccttacccggcagcgtcgagttacttaataaaagcagttccattacttctccacctcatcaggaaatgtcaaaacgtaataatgctaccattatccatttaatgtcttactgatatggctcatgatgttacgcgtgtcacaggcaaagcgcggtcgctaaaagtgacgacaggccagatctgccatctggtatcgcctgaaaaattacaggtataatccgcaaaattatttaacacgtttagagacgaaaatggcaaaactgaccttacaagagcaactgctacaagcgggattagtgaccagcaaaaaaatggccaaagtccagcgcacggctaaaaaatcacgcgttcaggctcgtgaggccagagaggcggtggaagaaaataaaaaggcgcaacttgagcgtgataaacaactcagtgaacagcaaaaacaagcggttttagcgaaagagtttaaagctcaggttaagcaacttattgaaatgaatagaatcaatgtatctaaaggcgatattggttttaacttcaccgataataacgtcatcaaaaaaatagacgtggataagctcactcagacgcaactgattaatgggcgtctcgcgattgcgcgtctggttatcaataacagcggtgaatgtgaatatgcgattattcccgcgagcgtcgccgataaaatcgcacaacgagatgcggacagtattgtcgtaaacagtgcgctgagtcaggaagagcaggacgaagatgatccgtatgccgattttaaagttcccgacgatttgatgtggtaagtcacattcccgacgtttatgtagaaaaatttctcagagagtaaatatgctgaccgacacatctacccggcttaataaatatatcagtgaaagcggcatctgttcgcgtcgcgaggcggaccgttttatcgaacagggcaatgtctttatcaacggcaaacgcgccgccattggcgatcaggtagtcgcaggggatattgttaaagtaaatggtcggttgattgagccgcgagaagcggatgatttagtgctgattgcgctgaataaaccggttggcattgtcagtaccactgaagacggcgaacgcgacaatattgtcgattttgtgaaccacagcaaacgtatcttcccgattggtcgtctggataaagactcgcaggggctgatatttctgactaaccacggcgatctggtcaataagattctgcgtgccggtaacgatcacgaaaaagagtatctggtgacggtggataaaccgattaccgacgagtttattcgtggtatgggcgctggcgtgccgattctgggtaccgtcaccaaaaaatgtaaggtgaaaaaagaggcgccgtttgtctttcgcattaccctggtgcagggattaaaccgtcagatccgtcgtatgtgtgaatactttggttatgaagtgacgaaactggagcgtacgcgcattatgaacgtcagcctgagcgggattccgctgggcgagtggcgcgatctgacggacgatgagctgatcgatctgtttaaattgattgagcgttcctcttccgaagccaaaccaaaggccaaagcgaagccgaagaccacgggtattaagcgaccggtcgtggcgatcgaaaaaagcaatgagaaagcgcgcccgacatcaagcggtaagcgctttacctcgccgggacgaaagaagaaaggacgttaacgtctgccgcgcgtcggcgtattcgccgaccaggagaatgacgcttccgtatcgggtttatacgcctgcttcttcttcaactggcgggcttttttcgcttcagcctcacgcagcgccatcagcttatcgatgtactccttttttacgctgttggtctcagaattggtcagcggacgaccgtgtgcaatacgggcgcggtccagcaacgttttcagttcgcgctgttcgcgctcggtcatctctttttgggtaatgcgggggagtgccatacgggtgccctcagttagccgatgcatttagtctacggcaatacgcaacgggcggatagcgtgtaagccgggtaagcttgcgccacccggcaatattttaatttacctttgccgtttcgcccgatttttcaacaatcggtttcccggaccagtaaccagccagtagtgaccctgaaaggttgtgccacactgagaacagcgcgccaggcagcgctgcgagcgggccaaagtagattttacccaatgcagcagcaagaccagagttctgcatcccgacttcgatcgccagcgttcgacaggttgactcatcaaaaccgaacagacgtccaccccattagccgccaagcaggccaagggtgttatgcaggatcaccgcgatgatcaccataaagccgacggaggcgatatgtgaagctgaacccgcgaccaccgcgctgatgattgccaaaatgcacaccatcgagaatgctggcagataaggttttaccactttcactacgcgcggaaacagatggtgaatcaccaaccccagcgtgattggaatgaccacaatctgtagaatgctcagcagcatacccatcacgtcgacttgaatatgggcatcgacgtacaggcgcgtgagtagtggtgtggcgaccacgccgaccagcgtggagaccgatgaaatggtgactgagagcgcgacgtctcccttcgccagatagatcattacgttagaggcggtgccgctggctacgctaccgaccagtaccatcccggcggacagatctggcggcatcttaaacagcaacgccagcagccatgccgcgagcggcattaccagatagtgcaggaatatccctgcggcgacaggggctggtcgggagagcacgcgtttaaagtcgtcaacgttaagatggacccccataccgaacataatcaacatcagtagtgtcgcgacccacggcccaacaggagtaaaggtggatggtgtgtaatacgcagtgagagagagcagcagcgcccataacgggaacagccgggtaatgacggcgagcatgttgttttccttgcaagtatgttgtgtttgttatcaacgggtcaggatcgagccagaccatagttattgtttatcgcgtgaaggaagattattcaaacaaattacgctcatgatccagtgtgggcacgtggcaggctggatgacgcgcctgcgtcgccatccggcaacgtatcgcccgatggcgcttacgctaccgtattagaaatatatagaggttctggtggcgtaaagaaaagcgccggcattgaagagaaggaagctttaacgcagtgataacttatattgtttcactttgctttggattgtgttttttaaactaaagtaaggcacccagggcaatgctgtgttccaggggcgaggggaaccatgaaaacagactatgcttgctccgtcaggtaattttccattacctgtcccatcgtatagttcagggttaaaaccaatcatttttggtgttgctatattagctttgtaactaataattcttccgggtaagatgttttgccatctttcagcatcttgacatattctgccgataaatccttgatcgccatgatagggtggggttcttatggcattgatttccttttcaggatttttcataaattcatcccacacatttttttttgcgggtgcaggaataaacataatacctgttgctggcgcaactgaagcaccatgctgagaaaagtcattaagtaatgttatttttttcatagttgtcagaggagtaatatctcccacaataacgctatctatatcaatatagagaatatcctcattaccaagaacaggatgcagtggattgaaaagttctagttttgcccaccatcctggccaatcatacaaaagaggcgctgtatttaccccttttatctttagcgcatctgttaaacaaacagaatcataacctttgagctgcttatgtaaccattgagcatgttttgtggtgaagtctttgctttgtctgagcacagaaacaataatcattatattccccggtgaatattaggtgattttagccatgttccactatatttaatgtgctttatattgcaacaaaattagtgttcatatggttatcgaagttttattacattcaagatgtgaatgtaatttatttgtttataatgttattaatatatgtaatgtaagttgataaatgttttaatgattgttttgtcttttatattttcatggggatatataaaataagagttgggatgggagtgatcttatttcccctttttactgctcccagctctatatcaattccaaatttggaatttagcttgcgattaatccataatccagtttttttctgtttttttgaaccatagatatacatctcatttgccagacgccaccaaaataaaaaaattacgacggcgattgttattggcctgcataagtaatcgatataataaaaattcattactgcgaataatctcatgtcgccagtattcccgtaatccatttccttttttagatatggaaaataataagcaatgtaagagtttgattttttcttcctccaatgaagaaagctatcttgttaaataagtgttattatcgtagggggttcacgtatcaattggtaaaaatactataagatggttttttataatacttcatttgctatgcaaactgaacatttaatgctaacaaataataaagggtattattttaattcaacaccgccgggctttatacccggcgagagattcaacaatcgtattgccagctactgactaaggcataaaggtggctgggggagtagcgccagctatcgtttagtccgagaaattcagcgcaaaactcgctgcaaaacagtctatctttgcgctcccggttatacagcgcgataccgagcgcgccctgccagtcatagcgtttgccgttatgtttgcggaaaaagacttccacttccggcaacgtggcctttaacggtagcttatcccacttatcgtccggtaacggtattatctttccccgcacgccgcgatcgcgaaacgacgcggagtagcagaggtattcattaccgccgtgcgccaccgccagttcacagtgagagtagataccgcgcgtgactttgcgcgtgagccagtcggcaaacctggcgatgccgcgatgctccgatcgccccttatagcaggcgagccagacggtggtttgactcatggttgccagcctgtggagtagtcgtaatccagcaccgcttcgatatcctccagcgcctccaccgccgcaatatgccgctgcgcgttggcaaacaggcgcatatcgtgatccatagtgacggtttcaaactgcgcggcgatgtcgttggtcagttcaatcaaaccgttatttttggcctgccacattaaccctgccggaatctgctgtgcctgacccattctggtgagtgacatttgctgaatacggctgttagcatcgctgtggaaatggttgccgtcgataacgatataatcggcggtaacatcatcacggtgagctttgattgcctgtataacttgtgcttttacactttcaagtgctgagacaaataacgcttcgtcatatacccactcgtttccctgtaatcggtaaaattttccgggtggcggtgtagtaataaattcaagagggttaaggcacacccaacaatttttatctcttagtcgccactgctcatcatctatagaaattactgagtcaggtaacactacgtttaatgaagaagtatcaatccagtctataacctcaaaggttgccggatggtaatatgcatattgagtcatatattcaccatgagatttttacaaaaccgctagaaccgcgtccaccagcgtatcctgataaggctatatttaagctgttaaccgacgctccaccaccacctccagctccgtagccactcgcattgcttccgttagataaaactgcgccagttcctcctttcccaaagaaagtagtttcagcattaccacctgatatagagtccaactggttaaaaccgcttaaaggtattcttgactgaacaatgcctcccgctcctcctgcccccccgttggcgacaacatctataaaaattgagtttccaccgttgatcccagaattcccagcctgtcctacttgcaccacgtttccagtagggttgctattaggtaatacaccaccagccccactagcgcccccagcccccacggttactggataattatttcccgcaataacggggacaatagcaatctctggctctccacttttgccagcattaccacctgaacaatagagaagaccatctgtattactcgtatgccctccacctccaccacctccaccgcctcctaacatttccacaaagacctgagtcaccccatcaggtaccgtaaacgtaccgttagccgtaaaaaactgataatgggaatgattagccggagccgctgcgctcgccttgtcatacgccgcctttaccgcgctcggcgtcgccgcctccgtcgtactggtgctgtcggtggcgttattaagcttcacgatccctttttgcgtcagcgtaccgtccggggcgccggtgatctgcccccaagcgtgtgtatgcctagccggagccgccgcactcgccttatccatcgccgccttgaccgcactgggcgttgccgcttcggtggtgctggtgctatcggtggcgttattaagcttcacaatccctttttgcgccagcgtgccgtccgggacgccggtaacctggttccagacgtgagtatggttcgccggagctgccgcattcgccttatccatcgccgcctttaccgcgctcggcgttgccgcttccgttgtgctggtgctgtccgtcgcactgttaagcttaacaatccccttttgcgtcagcgtaccgtccggaacgccggtaatctggttccaggtatgcgtgtgattacgcgcttccgccatcgccgcttttaccgcctttggcgtagccgctttggtttcgtcatcgctgtcggtggcgttactgagctgcgtaaagcctttctgcgttaatgtcgcatccgggtgatttgtcgaatgttcatgctcgtccagccgggtatccacatagtcgcgcgtcgccagcacgatgctcggatcgaccgtcagcgtcaccgccgtggtgttggagacttccataatcaggcggatacaaacctgcttgccacagccgcccggcagcagcggtttgtacgactcagggaatttgccgatggcgatcagctcgccctcgtcgtcgaacacgcccacttcacgcacataccagccgccaacgtcctccggcagcaccagttcggcaatcagccagttgggattattcggcgcaaccgtcagcgtattcatctcgccgcgccagacttcgtggcgtaatttggtctggctggcgatcggttcataatattgcccaccaccgtcgccaaccgccatcttttgcagatgtagctgttttttatccgcaagggcgctggcgattttcgccattcccctgtcggtcaggagggtataaaactcattatccataattactccgggtaaatagatgtaatttcaaggctccattgccctgtaccgaaatagatcggtttagtttgttgaacttccagaacctggaagggtaagacggtcgttatttctccaccgtaaagcgcgctgccaataacaggaatagcgctttggttaattatccagacaattaacgcttccagttttgaacgcacgttcttatattcatgaataagatcgaccagattattaaacagattttcatccatgccctggttgattagcttaatttcaaccttgaagaaataagccttaccgccatactcaaaccattcggaaatcgtgccgggtaaggataatatttccagtacgcggcgaacggcccagggggttcctttatatttatgcagttcaatcgcctgcttaattaactctcgtttctcctgttcattggcagcaaatagccagccttcgagcccctgtacatgaaactgttcggccaacgagggcaatgccgaggcatcaacgatatccaccagatagaccagcaacgccgtcaggtcgatttgcgcgaaacgttcggcggcaatgttcgccagaattgagaaacgttcgtcgctggccagcggcggcggcagaagcagtttatccatcgctgactccggcaatcgtcacgtcaatagccgtacattccgcccattcgtgcgcctgcaatacctttttcgcgggcatatccagcgcgacgtcgtaaacgccatccacttgtagcactttaattatctggtttggcacaatgtcctggcccagccgggtctggcgcgagcgcgtccatgtattaatcgcttcacgcgcggcggcaagcgtcgtctcctgatcggcggtggtaaacagcgtcagccgggcgctgatctgataagccacgcgcggagaacatttagcgctcaccttatcggttagcgggcgctttttctctttgctcacctcccgttcgatctgggcaagaagctccggccccggcagaccgttcagggtcagcggatagagttccacgcagccttccgccagcccttcatccggccccagtaccgccacgtcgataatcgactggctgaccgagagcgtatggaagcgataggcgccatagctgcccgcgttgctgaaactttccggcgctagctggatgcgtttacgtagcgcgtcgtcgttctcttcgccgcagccgccacttgaggccgtcagattggtgacgctgatatcgtaattgcccacgcggtctaccagcgcgctgatttgcgcaggctgccagttgttgccgggttcaccggtcactacacaggttgcagttaccgcaacgctcaggctgcccgcaggcaacagaacatcttcgtcggtggcgaacatcacgctatccgacgcgctggcgcgggtaccctgtggaatcaccaggttacttttagccgcttgagtaacagaaaactgcagcgtggtttttgccgcctgagcgggcagacggtgaacgccaaccagctcgcctaaataatccagcatcggcgcacgggaatacgcgaccaggttttgcttcgctgcctcctggatggcgatgcggacaaggttttcacgataagcaaacaggtcaatgagcagccgctcagcctgcgccgggtagagttttttaccgctggcttcttcatattgcgcaatcatctcgctggtgatttgcgcggggtcgcggtcaataaagtcgggttcggctatcgccataacacctccgttgagttaattacgccgtctgcggcgcgccattgcacgcgtaacgtcaggtgttcgccgtcaatcgtcggcgtcaccttcagcaaccggcagcgaggttcccacatgcgaatcgcttccaccgattcgcgaacaacgtgcggaatggcccgctcgatcgggtaatcgatgtagcgccacagattgctgccaaaaagcggcctgtggggatcgctgccgcgcggcgtgcgcagaatgatgtgtattgcctgatgaatatcatccagcccgcagacgtattcttcaggacgttgcaaggcaggttgccagtgcagggtcgagggtcgtgttttcgtgttcatgaggctattttcgccttccggcggggggagagatattaaagcgctttaaggaaataattgatggcggggtcagaatgtgttttgcccggtggcgcttctgcgcttaccgggcctgtgttgatgcacattttgttaaatggcgaagatcgcgttttacgtaaagttaaaatgaaattgctgtaatttcacctttgtctacagaagcgtagtaccagaattcatcattgatttctgcgtgcttcattttctcaactggaatcgttttctgccgtccattaaccgagagtgtgatcgaacccgttagctgctcccggctgataatagcgaaatccccgcgggtgttgctataagccgtcgtttcattggaaaggctgtgcttcgctccattagcgattacagaataatcaaaattgactttctttttgaaaatagcttgtacatgataatactcgccgtaaacagcaggatcatggaataaaccaaaatgaccaccgctattttgcaacttgacgaaataatagtcagggatgataaacttctgtttacctgccgctatttctttagtaatgattttttgtcttacgatttcctgtccggccgtttttttataaccgttaagcatcaatgaataggaccaaaggaatacgataccacagagaacagtcacggcagttacgccgacgactccagccttaacgccgcttttcaacagggcgtaagcgatgaaggagatagctaaaaggaaaaacataaacgtaccgttcataacccgatcggggtaggacggcgacgcgaacatgattaaggaagtgccaatacctatacatacgactaacgcagcgcagataagggacgttttatcaattttggcgcgaatctgcttattgaatatgaccagtaagaccagcaataacaaaacaacataagctatccagatcagcgccagatggttatgaacgcgttctgttaagtgaatgaaaatacgttcaaaaatcggccttccataccagaattctttgccgctggcgcggatgaaattgcccggagaaagtatcaatacgcatgaacctgcgattgcacagagactataaactatcttattgcgcgaaacagatttgttttgccataactcgtatgcaatggccagaacagaaataagcgagacgaaaggtgagacgctttcattggaacagcctgccataaagcttagtaatgcaacccacgggctgatcgctttactgttttttattgttatggtgtaaaagaagaacagccatgcaacaacgaacagattcgtccacaaataattcgcagcaccaacgatccagaaagtggtttgacccaaattcgggttcgaaatccagtaagtgaagaatattagtgggaataataagtagtcggatttattccagcgtaatgtacctgagggtgtcttcacaatgaaataacaaaataccagtgtcgaaacggctgcgctgatggaatacacgagttgagaacgtgtatacaggatgagtgcgctggtgtaatcagctataatcctgccactccatgtcatataatgatgaaaatgtgattccggcgaaattcctaaaaggtaatagcggtaatcatcagagtgaataggggtataccattcaataagaaaaatggccaaaaaagccagtagtatcatcgccgttttcggtaatatcttgagcatagtgttcattattccatcattgtttttttgtttttcacgatatagcggggtctttgcttcacctccgtgtaaacgcgtccgatatattcacccatgatgcctatgccgataagctggatgccgcctaagaagagaatcgcggtcataagcgaaggataaccaggaacagggtttccccacatcaatttatcaatgatcatccacatggcatatatcagggagagggcagaaacgctcactcctatatacatccagatacgcaaagggaaagtagaaaaacttgtaatcccctccagcgccaggttccagagtttccagccattaaattttgagttacctgcgacacgttcagcacgggcatattcgaccacatctgtttgacctccaacccatgaaagtatacctttcatgaaaaggttacgttctggtaatagcttgatattttctacaatctcgcgcgacatcaatcgaaaatcaccgacattctcttcaatctttggcgtactgattttgttatgcagcctgtagaaccactcagcgcttttacgcttcaggtggccatccgttgaacgatcgatacgcttagccagcaccatttctgcaccagcctgccatttattgatcaaatgtgggattacttcgatgggatcttgtaaatcaacatcgatagggatcaccacatctccggtcgcgtgatctaatccggcaaaaagtgcaggttctttaccaaaattgcgggtaaatgagatcggaacaacaagaggatcggcaacagctaatgcgctgatgattgattcagtcgcatcgtgactcccatcattaacgaagataatctcaacgttataaggtttaagtgaactgtattctctgaccgttttatagaaaatagggatcgcgtcctcttcattaaagacgggaaccactaatgaaattttcatttctcattcctgaaaacaatgaatctggaatataaaaatccgcaaataaggctaattgcggaaaatacaatgagcgtaaaaatgggaggcatagcacacttgtcgcctgtccatcccacgacggcgctcagcacgcccataaaaccgacgtacagcaaataacgtccggttgatacgctggctccaaaggtaaaccgggcgttagcgaaaaaactaaaactgacagcgacagcaaagcccgctacgtttgccaaagcctgacttgtttgaaatccatagacgcaaagggcaaagatagcccaatgcaaagcagtattaagtacgcctatcgaaacgtactttataaataattttatcattatagcaatcaagaagttgtaattcagcgaagtctaccagacaaaactgagaggatcattcctgaacagcagattttatgtaaacagggcgaagttaaagtaaaaaataacgctagttttccaatatacatatatgcaatatttgcagcgcaaagtgattacattttcatcggaaatagcgcgcgaaaagggactaatcacgttgcgctgaaaataaatatcctccagcaatttgcccggtggcgcttctgcgcttaccgggccggtgtttatgcaccttttgcaggctggataaggcgaagccaccatccagcagcaatttgcaggttagtgagagtggtggttagagttgccgccgttgtccatcagcgtgccgctggcgttaacgttgccgaggacattcacgttgcccgtaatcaccgcgctgtttccgacgccgccgctgcctgccataccgccaagccaggtgagttttttcatcacggtaacgtcgccggtaaaggtgctgagcggcgcatcgacggtgacattcagcgctttaatgcccgtatggggcgcttccacgttgacatctaccgccttgacgcccacggaggtggccgccacgtctacggtttctgatatcaccgtgacgtgctgcgccctgacctctacttgcggtgaagtaagctgcgtatgttccttcacttcaatgacgattttttctatgccgccgttgacggtgagctggtgtaacgcacggtcatattcaaaggccgcgccgtcggaaaactgcacgtagcgcttgtcgcgcgaggccagcggcgcggtatccacgctggagtagaccgcgcccagcaccaccccatcctcgccgttgtcgtcgagcgaaacttccacctgttcgccaatatccggcaaccagtaatctttgttgtcctgcgtgttgcgttgcagcaccgcaagccagttactgcgcaggttatcgcactccggtagagtgactctgacgcgcacgaccgcctcatcaatatcgctgataatacccgtctggcgggtaacgcctttcatattgcctccttactggctggttgccggtccgcgtgaaatgtcgatttcggtagtgtagccgccgctgcgcgtgagtttgtgcatggatttatcaatcagccactgcccggaaagtacgccaaaatcgctcagttctatcttgttgcccgccgtcaactgcgggcagcccatcaagctgagcgtgccggtctgctggtattcgttgtggctgtccagcgcggcattggctttagcctgcgccgcgccggtatccggagcgcgactgttgatcttcagggtatcggcgctggtcgccgcaccgcgcgccgaggtcttttcctggctatcatgggtataaataaccagttctttttgcttgctattttgatgctgcacggtggcgtttttgtagatccggttgatggtatctttgaacgtgtagtgcgaaacatccgtccgcctgagcgtcttcaccggcgccagacagcgcagcgtcggcagatgcgaaaagatcagctccgtcgccgtcactttcacggtatagccatattcactcgccagccgtttgagaaacgctacatcggtttcggcatattgcgtgacccgatcaatcgtcagcggcgcaatcttgcccgccagcgttaaaccgtgtttttgcgcgatgcgactggcgatggcggaaagcgtagtctcctcaaagccctggctgtttttggtgcgtagcgctttgctgaccgaggtggcgataccgtcgatattgaccgtcgaaggcggcgcgctgatatcaattttatcaatgacatagattccgcaatcgagcagatcttcgccctggtagcccaggcgcagcgccagcgtgtcgccttttcccggataccattcgtttacccagcgcccggtgctatcttccagcgcaatggcaatgacatccgactcgtttttaatactgtcgctgtaactgatgctggtgacataaggcgcgatgtcgtaagtgatctctttatgtccgtaccaaagggtaaaaatgggcgtcagggtggcgaacaccccgccggataccgttatctcagccatggcggtagctccggggtcgtttgcgtgacgctgataaccgggatgatcagccgcacgcctgacggtaaaaccggcataatagcgacgtgcggattggccgcgatgatgcgttcgtaggccagcgcatcgccgtaatagcgccaggcgagattatcccagcgttcgccgtcggtggtgacatgttcaaggtagcgcattacagactcctcgtaatatcggcagcggcaagctggctcacgtcaggagcgcttgtttgcagcgtgccgcgcgcctgattgaccagcgtcgcggcgctgtcgtaagtcgcttccgcgacgctgctggtgatagcgtcaaacagcgattcggcgtgttcgataagcgtgccggcatcgcccgcgcattcgcggatccccggcaggctgtcgatcagttcctgcattttcgccgccagcgctttcggcagcccggccagcgtttgcaaatccagcggctgctggaacagcgcgtctatcgaactcatggtttttttcagcgaatcgacgatatcgccgcatttttctttcagcgctttggcttccttcaccagttctttcgcctgggcgatcgtttttttgatgtcatcaatggcgtcggccacctcatccatcatctctttggcttcacgcataccctcttcaacgacgctcagcagttcatcgaaccaggaatcgttaacgtcgggaagctcatccaacatctcgtcaatgttcggttcctgggtggtgatggccggaggcagcagcgggctcttcggatcgccggtgtactcctgtagcgacaaactgccgccctgggcaatgacgttaccgtaaggatcggtgtgttggtgggtagcggtcagatcggtaatcacgaaccagccgcgataatcgccgttgccgaacaccagcgccatcgcctggtgcgcggtcatcgcttcccgcagacggttcagctcggtggtcggctggcaatactgactatgaaagttgaatttcagggtgattttgtccagcttatcgccgataaattgcacgcccggtttcccttcaatacgggcatggctggtgtaatccacgcccatcgtactttcaaattcgtcccagtaagcgacgacgtcaaattctatttcgcctaatacggcatacattatgcgtactcccggcgccgttgctgcgccatgacatcgttaatcattctctccagctcgcgtttgctcagcgacagcacgttgttgatatctttggcggcattcgcgccgcttccctgcacggtaacctgcggggaaaagtgtacctgcacgttgctttgcgcgcgggagggcagcgtataaggtttcccgccggatttgccgggaagcgcggctggcgtcggcggcgtggcggcgcttttcgtcttcacaggctgcggcgaggccatcgttttggccgaggttgtcaccgctttcgctcccgatgccagcggcgcgctggcctgttgcgcgaccattgttccggcaataccggggacggcggcggcgacagacggcatttcagcgctgatgcccagcgcgcttttcgcccagtcggggatcagcgcttttatcttctcaatcgccccgctcaggaaaggaagcgcattcagaatgccgttgatcaggctatcgagaatattgccgccaaattcgctgaaactggcggggagttcaatgccaaaccagtccagtacgccggcgaaggcgcggtaaaacaaccccagcggcgaccagtcgagaatcagacgcgtgacgccggcaatgcctccgtcaaaggcggttttgatgcgctcccagactccggcaaagaaaccggaaatcggttcccagtagcgataaagtaaataggcggcgcttgcgatagcggtgatagtcaggccgacagggttcatcagcagcgcccgacccagccagataaacgtctggccgaccagccgtagcccttttatcaggccgtttcccagcagcatcgtcaggcttttcgcaccgttgccaaacgatttcagaaccgacagcgcgcgactgccgccgcccagcgccagaccggctttgaccttcaggaagatatcgatcaggcgaataaacggtgacgcaatgaggtttgctcccagcctgagaatattcagcgccccgttgaacagccagataacgctaacgactttagcgaccccttgcaccagcgccggattttcccgcagccaggcgctgaactgccgcaccagcggcgtgatgctttgcgccagttcgccaatggcgggcatcagttccaggccgacggtcagccacagatcgttaagtgaaagttgtaacgctttggtctgttctccgggcgatgtcattttcgcggcgaagtcatcatcaataacatgttgccccgccgcctgcattgcggaggcttttagctggcgatattcgtccatattcgccagcatcggggcgagaaaatcccgcgtttgcgcatcgccgaacatcgcgccgaggttaaatttctccaccatggcctgtagcgcgtcgccgcgcgcggaaagatcctcaatcttcatggtttgcctgaaggtgtcgaggatctgcgggttcattttctccagttgcatctgcacgatgtgggtcatcgcttccgtcacgccgatcccattttgctgatgctccagcagcgatccctgaagatccacgccctggcgggcaaaccaactgtccgtctctttcgagaaggcggatttcaggaaatggtcgaaattcgctgccgccgcgcctgcgtcaggggcatttttcatggcgatttgcatcgttgcggtcagttccgcaatgccttctttcccctgagcgccggtttttccggcaaaggcgttaatccactgggtttgctctgcaacggagccgccgccgctttttgccacgctgtacagcatattttgcgcaaaacggaagtcgtcaggggcgatgttcagtttgtcgcgagtggccagagccgcctgcgcccagctttgcgcgctgtcgcgggaggcggtcgcggctttggcgatatcgggcatgtagcggctaagatcctgcaatgcgctgacgccgccttcgatcatcgtggcggcggtgctttgcagatctttttgatcttgattgaaatcaaggctccagtcgcggatattcaggctcagggcgtcccgcgcggtgttatccatgccgcccttcgccgccatatcgaccatgttgccctgaaattcgtaaggcagcttccagtcgggagtctcaacgttcaggagcttgccgagctgtccggcgaacgtttgtgttttttccagcaacccggcgcgctgtttatcgttctcttcccggcgaagggcggagttagcgagctgttgcgtaagccgggtgacttttgtttgctcaaagctgagcgtgtgcagcgtgctggcgttgagtgagccgtaacgggctattgcctgcgtcaacgtctcattacgcgcctgaagctgggtaataatgtcgttggccaaaatagtgtctcgtataagttgcccggtaacaggctgcttgccggaaaaaggacagggaaggagtgaaccgggcttgggtcaggaaacccgcaggcattaagcctgcgagtcgtattcgtgtttaatttgcgcgctggcttcgtccagccagcaggtaaaatcgtcaaccgacagcgcgtcaatttcactgggcggaaagcgaaaccacctcgccagcagcgccattgcctgccacagttgctgtgggttctgtagccatgctaagcatggactgaaatcgtttctgcaatgcctgatagtccagcagatccatttccgccagatcttcggttaccagcccggtcatagccgccatcagcggctcatcccactcttccggtttatcgctggcgcgtcgcgcggcgcgcatatcttttaccttcaggcgacgtaattgcagaacgtcgatacgttccccggcggcggaggtaaacgggaactgcagggtatatttttcgttcatggtatagtccttattcgtcgtgttaaattcggggccgtagccccgaagtaattaaccgccaatattattgcggtaggcatttaattgatccgcgccatttacgcggaaaatattcgccagataatccagttcaagaagcgtttcaccgtcaaccacctgtttaatataagtgcagccgaaggcgctgctgaattccgggttttcattctgtttaaacgttcccagcgggttctttttaaacattacggtcatatgcgtcaccagcgctaactgatccgctttaccctgcgagttataacaatcgatgctggagcggcactgcaatgccaccgcctgccacggatttgccgttttacgcatgacgtcgtggtaaaacgagttccatttaatttcaccttccagtttgtcaaaaccggcaggcagttcaattttaccgaccatccccagcgctttatgctcctgcataatcatgctgatatcaggcagtttaatttcactcgcgcgacctaaaagattattaccatcaagataaatattggcgttggtaatacggttaatttgaatttttccagccattagcgattgctctccagagaaactaaatattcagaggtaatttcggtttcaaacgtcagacgttccagcggcggcggcggggtgaatttgtagctcagcaacagatgcccggctgccagttcagtctgttcgttacgcgccgggtcgtaccagcattcaaagcccaacaacgcgccgtcggcaatcagcttgcggccccaggtgttcaccgattcggttagcgcgtcgatcagcgcctgattaatcggcatatccatgtattgctggctaaaatagcgaatcgattcgttaatcacatcaccagtacggcgcacgttctcaaagttacgcatatgagtaaccgtcggccaggcggcggtacggttgccccacaggcgcaaaccggagccatagctgttgaagatggtggtgatgccgttttcattcagttgattcacttcggtttgcggatcgtcgatcatcgctgacagcgagcgctctacgccggtaatgccctgaatttcctgattggagttgctccaccagaagcctttttccagatccactttggcacgcaggccagcggcgcgagaggagagcggctccaggacttcgctgttcgtcgcgctgtcgtacactttaacgtgcggatagcacagacgcgcgcgatcggaactggtattgaagttaatcgccccctgcggaccgcgccctgccagaacctgctggaaagtcgtgccgatgggcgcatcaatgtaggtaatggctcccagcgcttctgcctgagcgataagcttaacggcgaccgagttttgcgtacaaaagaccggcgcaatcaggatcttcgcgtaaaaaccaaactggttccaggtgtcctgtaacagcttcatgccggtacggtcacccgccgtgtttaccgcgccaacaatatcggcggcagtcactttggtggggtccgcgtaagtataatttacataggcctgaacgccgggtttcagattggtccccatgcaggtgattttaccggtcagcatatcaatggtgtaatcggtgcctttgatataagcgtttccggcgttcgtgctgcggccaatgttcatcgtttgcacggccccgtgcttgagttgaatctgaccgttgtcatcaaccttcacggtttcactgggaatggtacttttgtgtaccgccggattcagcacgttaatcaccacgaccgtccctgcgccgtgatcgtagatcgccttcagcgcctgcgggatggtgaaatttgccagacctgggccaaactgtgccgcgtcgctttcagaaaggcacagcgttggctggttaaccgggccgcatggcgcggtgccgatcagaccaataaccgcagatttaaccgccttaaccggacgtgggccggtttcgatctcaatggtctctacaccgtgcaggtaattagctgccatggacaatttcctcttcattagtttctacttcttgcgtaaccactggcaccaggtgacggcgggcaatcatggtgattacccactcgttatcttccggcagcgagatttcgctattgggccacagtaagacttcctgaccgtcggcgagcgtgacgccgcttgccgggccactgtagatatatttcattgaatttcctcataattaacgattgtcagcaggggggagtccttgctttcctgttccgcgataaacagggtgctggcggtcatatccagggcgtaacggcagaagtttgcggcgtcgccgatatatttttcgctttccagccagagcggacgatcacagtcgggaagttcaatgccccccaacgagcgacgtagacgatccagcgcgtttatcgcgtcacttatttgcggaacaataacggtggcggaaatccggattagttgtttttgtaccgtggcatccgtattttctggttcggcaaaaaccgaaccgcagtagtgaattaataccgttacctgctgtcctgttgggatatatactttcgcatcggttgatgaaatatgtatatccatatcagggtttaattcacgtagtctattcgccacggtatgtataacagataatgtttccatatacggttttccttgatttaccgggagagataatattctctcttcgttatcgttcagacgtattttgatgtatcaggcatcaggcgtcttttaatctcctttagagaaaaaagttaaaacaaataaaaaatccccggcgtataaacgacggggatttgtttaatggttacctcgttgaatcagttctattttgctatatagcgcatccagttttgcttccagaacggcctggccgcgaagataatcctcgcggcggacataatgcagcggtaaatcggcgcgaaattccagaaattctctctccagcctggaccagcccgcttctgattcgcgccgggcagcttccagtgcttcaaaacgttcattcagccgtttttcaatttgcgccagcagcaatttaccggcagcaaacattaatccaacaaacgaaagtaagagggagatgacttcccaaaaatcgatactgagtttcattactccctctgattaatgaatgcagctagcctgcccccattgcaaataacggggagcatgttggtataaaatcgctttggggtagtgacgattctcgcgccagtttgcggcgctgcgcccggcgttaacgcgttctacatgttcaaaccagatggacgcatccaacccctttgcggcggccagctttttatctctgttcacccagtcttgcccgccgttataggcgctcagagtgaaagccattcgctggcagctattttttgctaacacgcttttccacaactggcggtcatactgtaccagcgcgcgtatcgcccaggcgggattaaacggcttgttttcgtggagttccgggtacaactggctcacccattttgccgtcgcaggcataaattgcgccataccctgcgcgccagccggagaaagcgcgtcaggcgcccagccggattcctgatgtagttgcccggcaaaatcagcaacgggggcgttaagcccccagatttcgcgcgcggtacgaatcacttcgttgcgccattgcagggaagcgcgcggcggttcggcagcgtcggcagacaagaaagtcatagcgcagaccaggcatacgtattgataacgcatcgttacagccccagcgcgacggcaaggcaaattgccgcaacgatgatcgcgcgacgaatcatcgccgcggcgcagcacagcgattcttcccaggggcaaaaggagtcgggacgtgcccaggggaaaagactacggtcgagccagtaacccagcaccgctgataacgaaaccaggctgagtttatagatgacgaccggaatttgcgctgatgatgtccagccgataagcgcaaacagtacgacagaggcaaccagccagccggaaagtcggggaacaataatttttcgcatactctatctcctgataattgagagagaagtatcgcttttccccatagtggaagaacgaaaagggctttaataaataactttaaaaaatgtttagcgcatggcgtcaaatgccaacaaataaacgaataaataaagctttcggggcagggggtagaggttgcctgcggagagtcagtatgtgtctgtggcaggctacgatggcggtattgctgcgtcataataatctttgattaaaattatcttattgatttttaaagtcagtttaaaaattcacgcgattgtgaggaaagcaatctttttgatcgaacgcagaaaaaaatgcaaaaaattaactgtatatgcatacagtattgtgtaaaatgatgacatcagtgaaggcttacttcacctataaaataaatacatattataaattgaaaacgatatatatatttttttaatttataattaaatgcgttgatagtaaatatttatatatattttgaatgtattgataggtagttattgcaccgttttttacgcttccctttttggtgccgtcacggggagcatggtgctggatatggagataaaatatgattcagaaatcaaaagaaatggttcggcttccggagattattaacgatctggcgtttcatgcgtcgcaggtgcttattgaaagcatgaatattgatagcgcgtcagccgaaaatgccggtcaggcaattgctgacagaatgatgcgcaactggggcgggcaaagcatttattttcccaaaggtatctctggtcgggcttcggaacgggattatcagatttacagcgagtgcgatgggcgtaattatgcggagctggccaaaaagtacaatttgacactgcagtggatctataaaatcgttaagcgggtccacacggaaaaacagcaccagcggcgtatgctgtaagcgatatcgggtatggcgtatagcgcgacaagcgctatacgccgggagcagcgacaggccggataaggcgcctgcgtcgccatccggcagcgtattgcctgatagcgctcacccgctgccgtgtcagggcgattattcaaataagttctgatgtagtttttgcaccactttctcggcatcgtctcccggcacgaggaagcacagattgtggctggaggcgccgtaacaaatcatgcgaatgttgaacggttccaggacgccaaacacttctttaccaacaccgcaggcttttgacaggttgttgccaatcagcgcgaccagcgccagtccttcttcaacttcgacccgacacagcgcggaaagctccatcaataaggattgggtcagtaacgtatcgcccgtggaggtggagccggtagtatccagcgtcagcgcgacgctcacctccgaagtggtaatcagatctaccgaaatattatgccgcgccagaatgccgaacacctctgccaggaaacctcgtgagtgcagcatattcaggctgtgcagcgtcaatagcgtttgattgcggcgcagcgccagcgcgcggaacagcggcgggttttgggttttattgcacaccagcgtaccgcccgcttgcggatctttactggagccaacgaagaccgggatatcgctacgcacggccgggagtaaggtggctggatgcagtacttttgcgccgaaggttgccatctccgccgcttcttcaaagtcgatttcatcaattcgctgcgcgacaggcactacgcgcgggtcggtggtgtaaataccgggcacatctgtccagatatcaacccgcgcggcgtggagcgcttcagccagcaacgctgccgtatagtcgctgccgccgcggcctaacgtcgtggtgcggcctttgctttcactgccgataaagccctgagtaatgaccaacgtttcgctcaggcgcgggagcaactgctgcgcggccagttccgcaagcgctgcgacgtccggttccgcacgaccaaagcgatcgctggtacgcatcactttgcgcacgtcgaaccagtgggcctgtacgtcgcgttcacgcaggatctcaacaaatagcagggtagacatcagctcgccgtggctgaccagttcatcggtcagggctgccgatgtcgccagcgatgccgcctccgccagaatagtgatgttttccagcaggcgttcaatctcttcgcgaatgacattcggatgacgcagacgatcaaggatatcgaactggattttacggatggcgtcgagcgtagcgaaacgttcgccgggctccatcccttcggccagcgccaccagcaggttagtgatgccggcagacgcggaaagcacgactaaacgaacattggtgtcggaaagtacgatatccgcgctacggttcatggcgtcaaaatcagcgacgctggtaccgccaaatttggaaacaacgatctctgtcatatcaacctcgtgtcaggaaatgaaaaacgcgaccatggcacaagggcagaacagaaaccggtgcaggcgcaaatgcaagtaacgtatttataaataaaagttgtggcctggactgtcaacgttgggattatgcggattttttatgctgagtttaggctcagtaacagcgcttataaccccgatacccatttgccgcctttctgcacctcgaattatttagggtatatactttttatcctcattcgacagtgcctggggcaacggcactaaaacaatcacacttttctgtgactggcgttacaatcgatcccagtcacaattctcaaatcagaagagtattgctaatgaaaaacatcaatccaacgcagacttctgcctggcaggcgctccagaaacactacgatgaaatgaaagacgttacgatcgctgagcttttcgcgaacgatagcgaccgtttcgctaaattttccgcgacgtttgacgatctgatgctggtggatttctccaaaaaccgcatcaccgaagagacgctggcaaaattacaggatctggcgaaagagaccgatctggccggcgcgattaaatccatgttctccggcgagaagatcaaccgcaccgaagaccgcgccgtgctgcacgtggcgctgcgtaaccgtagcaatacgccgatcattgtggacggcaaagatgtgatgccggaagtgaacgccgtacttgagaagatgaaaactttctcgcaagcgattatctccggtcagtggaaaggctacaccggtaaggccatcaccgacgtggtgaacatcggtatcggcggttccgacctcggcccgttcatggtgaccgaagcgctgcgtccgtataaaaatcatctgactatgcacttcgtctctaacgtcgatggtacccacatcgctgaagtgctgaagaaagtgaaccctgaaaccacgctgttcctggtcgcgtcgaaaactttcaccacccaggaaaccatgaccaacgcccacagcgcgcgcgactggttcctgaaaactgcaggcgatgaaaaacacgtggcgaaacactttgctgcgctctccaccaacgccaaagcggtcggcgaatttggtatcgacacggccaatatgttcgagttctgggactgggtcggtggtcgttactcgctgtggtctgccatcgggctgtccattattctgtccgtcggtttcgacaactttgtcgagctgctttccggcgcgcacgcgatggacaagcatttctccaccactccggcggagaaaaacctacccattctgctggcgttgattggcatctggtacaacaatttcttcggcgcggaaaccgaagccattctgccgtatgaccagtatatgcaccgtttcgccgcctacttccagcagggtaacatggaatccaacggtaaatacgttgaccgtaacggcaacgccgtggattaccagacaggcccaattatctggggcgaaccaggcaccaacggtcagcacgcgttttatcaattgattcaccagggtactaaaatggtgccgtgtgattttatcgccccggctatcacccataacccgctatccgatcatcatcagaagctgctgtctaacttcttcgcgcagaccgaagcgctggcgtttggtaaatcccgcgaggtggttgagcaggaatatcgcgatcagggtaaagatccggcgcagcttgaacacgttgtgccattcaaagtgtttgaaggcaaccgcccgaccaactctatcctgctgcgcgaaattacgccgttcagcctgggcgcactgattgcgttgtatgagcataaaatctttacgcagggcgtcatcctgaacatctttactttcgaccagtggggcgttgagttgggtaaacagttggctaaccgtattctgccggagttgggcgatgataaagctatttcgtcccatgatagctctactaacggtctgattaaccgttataaagcctggcgcgcctgatggcactgcgcttatccggtctacgtaatgcatagcgtctgtaggccgggtaaggcgtttcgccgccatccggcaaaaagagaataagataataaaaaggccgatattcacatcggctttttttataagataattccgcttgtccgtctttatccccacagttttatattgagcttaatcctaaaataagcaataaccagaaaatcactctgcgttattttcagattatacggatgctgatgtcttttagtttaattttaacttattgattttatttgtttgttaattaaataatgtaggcgttacttctttaaagtttaattatcctaaaacttcgatgttatttctcccggacataatccgcctgctttggttgtgtatactcggtagcgcccgaaattcttttgggtaaatctccattcattcaatgaagggaagttatgatgaaaaaagtactgtatggcatttttgccataaccgcgcttgcggcgacatctgtctcggcagcccccgttcaggtgggtgaagcggcagggtcggcagcgacgtcggtatcggcgggaagctcctccgctaccagcgttagcaccgtaagttcggcggtgggcgtcgcgttagcggcaaccggcggcggcgatggttccaataccggaaccacgaccaccacgaccaccagtacccagtagtatcggtacgtttaaccataaccacactccggtgtggttattttgcccctctggagaagcgtcgtgaagcgactcgcacttatcctgatttgcctgctattacaggcgtgttcggccaccaccaaaggcctgggcgattcactgtgggacagtttgttcggtacgccaggcgtacagctaacggatgacgatattcaaaacatgccttatgccagccagtacatgcagcttaacggcggtcctcaactgtttatggtgctcgctttctcggaaaacgggcagcagaaatgggtgacgcaggatggcgcgacgatcgtgacgcagcatggccgtctggtcaaaactctgctcggcggcgacaacctgatcgatgtgaataatctggcgaccgacccgctggcgaaaccaggacagattatcgatggcgcgacctggactcgcaccctgggctggaccgaacatcgccaggtgcgttacgccaccgcccgttccgtttttacatggcgagggaccgatagagtgaacgtcggcagtgaggaaaccgccgtgcgggtgttagatgaagaagtgacgaccgatcaaacgcgctggcgtaatcgctactgggttgatagcgaaggccaaattcgccagacggaacagtatctgggcgcgaattactttccggtgaaaaccacgctgattaaggcggcaaaatcatgatgaaaaggacgataagcgcgctggcgctggcctttgtcgcgtcatccgcctttgccagcggcactgttaccgtttttacccagggtaatagcgagcctaaaacgctgacagacgctgagcgtctgctcgatttagtcggacagccgcgcctggcaacgagctggtggcctgcggcggtgataggcgaagaacaggcgaccgtgacggcgcgtcagcagcaacaggaacttctcgggcggctggcggtgctcagcgctgaggaagacggcgatgctgcggcggcgataaacacactgcgccgacagattcaggcggtgaaggtgacgggcagacaattcgtgaatcttgatcctgacgtggttcgggtgagcgaacgaggtaacccgccgctgcaaggtcactacatgctctgggtcggaccgcaacccacgcaggtgacgctctttggcttgattagccagccgggcagccagccgttcgtccctgggcgggacgtcgccagttatctcgaggatcagcgcttactcagcggcgcggatcgtagctatgcctgggtggtttaccctgatggacgcagccaaaaagcgccggtggcttactggaataaacgtcatatcgagccgatgcccggcagcattatttttgtcggttttgccgattccctttggcgcggcacgccggaggcgataaatgccgacattcttcataccctgacgcagcggataccggaataatgaaaaaaacacatctgctcagcgtgctggcgctgggtattagcgcggcctgccatgccgaaacatatccagcccctgttgggccttcacaatctgactttggcggcgtgggcctgctgcaaacgccgacagcgcgtatggcgcgtgaaggggagatgagcctgaactatcgcgataacgatcagtaccgctactactcggcttcggttcagcttttcccgtggctggaaaccacgttgcgctataccgatgtccgtacgaaaaagtacagcagcgtggaatcattctccggcgaccagacttacaaagataaagcgtttgatgtgaaactgcggttgtgggaagagagttactggatgccgcaggtggcggttggcgcgcgcgatatcggcgggacggggctgtttgatgcggaatatattgtagcgagtaaggcctgggggccgtttgatttttcattaggtctcggctggggctatcttggcaccagcggcaatgtgtctaatcctttctgttcgtatagtgataaattctgttcgcgtgataacagctacaaagaggcaggttccgtcgacggtagcgatatgtttcacggcccggcctcgctgtttggcggcgtggaataccagaccccgtggcaaccgctacgcctgaagctggagtatgaaggcaataactatcagcaggattttgcgggtaaactggagcagaagagcaagtttaacgtcggcgccatttaccgcgtcaccgattgggccgacgttaacctcagctacgagcgcggcaatacctttatgtttggcgttacgctgcgcaccaatttcaacgatttacgtcccgcgtatcatgacaattcacgcccgcaataccgaccacagccgcaggatgccatcctgcaacattcggtagtggctaatcaattaacgttattgaaatataatgccggtctggcggacccgaaaatccaggtcaaaggcgatacgctatacgttaccggtgaacaggtgaagtaccgcgactcccgtgaagggatcgtgcgcgctaaccggatcgtcatgaacgatctgccggaggggatccgcacgatccgcgtgacggaaaaccgccttaatctgccgcaggtcaccactgaaaccgatgtcgccagcctgaaacgccatctggaaggcgaaccgctgggacatgaaactccgctggcgcaaaaacgcgtggagccgatcgtgccagagagtactgaacagggctggtatatcgacaagtcgcgcgttgattttcatcttgatcccgtgctgaatcagtcggtaggcggcccggaaaacttctatatgtatcagttgggcgtaatgggaactgcggatctgtgggtcacggatcatctgctcaccacgggcagcgtgtttgccaatatcgccaacaactacgacaaatttaactacaccaatccgccgaaggactcgcatctgccgcgggtgcgtacgcatgtccgtgagtatgtgcagaatgatgtttatgtgaataacctacaggccaactacttccagtattttggcaatggtttctatgggcaggtctacggtggttatctggagaccatgtttggcggtgccggggcggaagtcctgtatcgcccggtagacagcaattgggcgtttggcctggatgccaactacgtgaaacagcgtgactggcgtagcgcgcaggatatgatgaagtttaccgattacagcgtgaagaccggacatttgaccgcatactggacgccgtcgttcgcccaggatgtgctggtgaaagccagcgttggtcagtatctggcgggcgataaaggcggtacgctggagatcgccaaacgcttcgatagcggcgtcgttgtcggcggttacgcgacgattaccgatgcgtcgccggatgaatatggggaaggggattttaccaaaggcgtatatgtttccgtgccgctggatatcttctcgtccggcccaacccgaagtcgtgcggcaattggctggacgccgctgacgcgtgacggtggtcaacagcttggccgtaagtttggcctgtatgatatgaccagtgacaggagcgtaaatttccgttaatactcaggccggataaggcgtttacggcgctatccggcaaattatcttattgaacaaaatataaacataaataaaaaatatagatgcccgtcacatttgtgcgttatacagaaacctcgccgcagagaaagagggggctgttatgatgccattatcgcgctcacgtcttgagtttatcgccacgattttacaaaacgtactaaatttggggctgcttaccctcggtctgatcctggtcgtttttctcggtaaagagacggttcatctggcggatgcattattcgcgcctgagcaagccagcaaatatgaactggtggaagggctggtgatctactttctttatttcgaatttattgcgctgattgtgaagtactttaagtctggccttcactttccgctgcgctatttcgtgtacattgggatcacggcgattgtgcgtctgatcattgtcgatcataaaacgccaatggatgtattactctattcggcggcgatcctcctgttggttatcacgttgtggttatgtaattcgaaccgactacggcgagaataggcgtcgccacaccgtaacggacgtatggcgtggcaataaattagccgctgtctataacgcataaaaaaagcgctccgaagagcgccaaaatacgaccataagtggggataacataacttgagggcagtggcattgcccgttgccgggcaggtacttcgataaaacttaacctttcacaccccctgccgtcaggccgttgaccagccaacgttgcgccaacaggaacaccagggtgataggaatagctgaaaggacggcggcggcggcaaagtcgccccacaggtagttttgcgggttgagatattgctgcatacccacggccagcgtatagctgtccacatcgcgcagtaacaacgaggcgaccggaacttcggtaatcgctgcgatgaacgacagaataaacaccaccgccagaatcggtacggaaagcggcagcagcaccaggcgaaacgcctgccacggggttgcgccatccagcgcggcggcctcttccagcgaactgtcgatagtttcgaagtagcctttaatcgtccaaacatgcagcgcgatgccgccaagataggcgaagatcacgccgccatgcgtattcagcccgataaatggaatgtattgtcccaggcgatcaaataacgcatacagcgctaccagagacaaaaccgccggaaacatttggaaaatcagcatccctttgagcagtgttgctttacctggaaaacgcattcgtgcgaaagcgtaggcgcaggtggtggagagcgccacgatgccgatggcggtaataccggcgattttcaccgagttccacagccacagcaggaccgggaagggaggcggcgttacccgaccatccgcatgttccacgctgaaacccagcgccagccgccagtgttcccaggagattttatccgggatcaggcttccggtggcgaagttcccttcacgtagcgagatagcgatgaccatcagcagcgggaacataatcgctgcgatgaaaatcagcagccccaggtgcgtgatgaggagacgcagtttctgagatttgggttggaccatagccattgttattatctcccttaatcaaacttcatacgcgtggctttcaggttcactattgccagcgcgcctaccagcaggaagatcagcgtggcaatggccgccgccagaccgaagtcctgaccgccgccgccttcaaaggcgatacggtaggtgtagctgacgagtagatcggtataaccggcaggcgtggtggtgccgagacggtctggcccgccgttggtcaataactgaatcaggacaaagttattaaagttaaaggcgaagctggcgatcatcagcggcgttagcggcttaatcagcagcggtaaggtgatcttaaagaaattctgaaatggaccggcgccgtccattgcggaggcttcgtacaggtcatccggaatcgctttcagcagtcccatgcacaggatcatcatgtagggatagcccagccaggtattcacgataatcaccattgcccgcgcggtgttggggtcgctgaaccaggcaggtttaatgccgaacagcgcgctcagcatcatattgatttcaccaaagctttggttgaataaccctttgaaaatcaaaattgaaataaacgacggtacggcgtagggcagaatcagcaggacgcggtagatagctttacctttcagcgcttcccactgtacgaggcaggccaataccatcccaaccgccacggttaacaccacagtgaggaccgaaaagaccacggtccagacgaagatagcgaaaaagggcttctggatcccttcgtcggtaaagacgcgcgtaaagtttttcgcgccgatagtaacggtataaccaggactgagtttttcatcaccccagcttccgtcggcgttgatcgactgataataaccgctatcgttgtttggccggtattttacgccgctctggttattggtcagcaggccgtcatcagccagtgtgtacagcggacgggtaccggaaaactgacgcagcgagctcataatcactttactttcatccggcaggacggcggttatctggttcaacgccagacggttctgggtgattattcgcagattggcgcgttcgccgcccggcagggcatcagtctctttcagctgtaatttttgttcgccgccgaaggaaaatgcgtcagacaggtaatgtttgcccgtttctccgtcggtgagggccagttgccactcgtcgccggtcgggtaaagaccgaagttataggtttttcctgcctgataagaacggtccatcagcacttgctgggcgcgttcaaaggtgagctggttggtgctgctgtagttagtaaaggcgatagcgatggtgcacaccagcgggaatagcacaaacagccccatgccggcgaggccagggtaaacgtagcgccaggcgtaggttttacgatttgcgaaaatatacaggccagcagagcttaaaatcagcgtcatgatggcgaacagatactccccttgtacgtacattaaaactacaaggtaacccaccagcaggcccagcagaccaattactgaccatttaagctggtcgctttgccaccagtgtttctttttaatgacatccatgggggttttcctctacagcgttgaaacttcctggccggagatgtgcctgatggcgctgcgcttatcaggcctacggtgtgttgtaggccggataaggcatttatgccgccatccggcacaggctcacggcattacttagtgatacggctttgtgcatctttcagcgcggcatccacggtttgacggccgctggcggcgttgatcacagccgtacgtaccgcataccagaaggcggacatctgcggaatattcggcatgatctcgcctttctgggcgttatccatggtggcggcgatacgggggtctttcgctaactgctcctggaaagatttcagcgccacggcgcccagcggtttatctttgttcaccgcttccagaccctgatcggtcagcaggtagttttcgaggaactctttcgccagctctttattcgggctggcagcgttaatccccgcgctcagcacgccgacgaacggtttcgagggtttacctttgaaggtcggcagcagggtgacaccgtagttgactttgctcttgtcgatgttcgaccatgcccacggaccgttgatggtcattgccgtttcgcctttattgaaggccgcttcggcgatggagtaatcggtatcggcgctcatatttttgttcttgatcatatcgatcaggaaagtcaggcccgctttcgcgccggcgttgtcgacaccaacgtctttcacgtcatacttgccgttttcaaatttgaacgcgtaaccgccgtcagcggcgatcaaaggccaggtgaaatacggctcttgcaggttgaacattatcgccgacttccctttcacttttagctctttatccagcgccgggatctcttcccaggttttcggcgggttcgggacgaggtctttgttataaatcagggagagggcttcaacggcgatggggtaggcgatcagcttgccgttataacgtaccgcatcccaggtgaacggatagagtttgtcctgaaacgctttatccggagtgacctccgccagcagaccagactgcgcgtagccgccaaaacggtcgtgcgcccagaagataatgtcaggaccgtcgccggtggctgccacctgcgggaatttctcttccagcttatccgggtgctcaacggtcactttaatgccggtgtcttgctcaaattttttaccgacctcggccagaccgttataacccttgtcgccgttgatccagataaccagtttaccttcttcaattttggcgagagccggggcggaaatcatcatcgtcgtaagtgcggataatgcgaggatgcctacgccagttttaatcttcatatctcccatcctttttggtgatgtacacagaggtggtttaacggtctctagtttctttatacgacaacctctttccatcctccccgcccctacgccccaccccggctttatgtgatctgtgttgcataaatgtgagtaatgcgtgctggcgcacacaaaaacacgccgatttttgcgggcggcatcacgaaattccttttctgtccgcgcccgtggtctcaggtgttgtgtcctcatcctcccgcctcctcccccataaaaaagccggggggtggaggatttaccccagtcagggatcgcgcatagtcaggccatcatgaatgttgctgtcaatgacaggttgtaacgaagggagaagggcatggcgagcgtacagctacgaaatgtaacgaaagcctggggtgacgtggtggtatcgaaagatattaacctcgatatccatgacggggagttcgtggtgtttgtgggaccgtcaggctgtggtaaatcgaccttgctgcgtatgatcgccgggcttgaaaccatcaccagtggcgacctgtttatcggggaaacccgtatgaatgatattccgcctgccgagcgcggcgtgggcatggtattccagtcttatgcgctctatccccatctctccgttgcagaaaacatgtctttcggcctcaagctggcgggcgccaaaaaagaggtaatgaatcaacgcgtcaaccaggtggcggaagtgctgcaactggcgcatctgctggaacgtaagccaaaagcgctttccggcgggcagcgtcagcgcgtagcgattggccgcacgctggtggcggagccgcgtgtgtttttgctggatgaaccgctctctaacctggatgccgcgctacgcgtgcagatgcgcattgaaatttctcgcctgcataaacgtctgggccgcacgatgatttacgtcacccacgatcaggtcgaggcgatgaccctggccgacaaaatcgtggtgctggacgccggtcgcgtcgcgcaggtcggtaagccgctggagctgtaccactatccggcggaccgttttgtcgcgggcttcatcggctcgccgaagatgaacttcctgccggtgaaagtgaccgccaccgcgattgaacaagtccaggtcgaactgccgaatcgccagcaaatctggctgccggtcgaaagtcgcggcgtgcaggtcggcgccaatatgtctttaggcattcggccggaacacctgctgccgagcgatatcgccgatgtcaccctggaaggcgaagtccaggtggtcgagcagttagggcacgaaacacaaattcatatccagatccccgccatccgtcaaaacctggtttatcgccagaatgacgtggtgttggtagaagagggcgccacattcgctatcggcctgccgccagagcgctgtcatctgttccgcgaggatggcagcgcatgtcgtcgtctgcatcaagagccgggtgtttaaggcctccataaaaaaacgaaacgcaaaaccattcgcagttttagaaggtggcagcgtttaaagaaaagcaatgatctcaggagatagaatgatgattactctgcgcaaactcccactggcggttgctgtcgcagcgggcgtaatgtccgctcaggcaatggctgtcgatttccacggttacgcccgttccggtattggctggacgggaagcggcggcgaacaacagtgtttccaggcaacgggtgcccaaagtaaataccgtctcggtaacgaatgtgaaacctatgcggaactgaaactgggccaggaagtgtggaaagagggcgataagagcttctatttcgacaccaacgtcgcctattcggttaaccagcagaacgactgggaatcgaccgatcccgccttccgcgaagcgaacgtgcagggtaaaaacctgattgaatggctgccgggctctaccatctgggccggtaagcgcttctatcagcgtcatgacgtacacatgatcgacttctactactgggatatttcaggtcctggcgcaggtatcgaaaatatcgatctgggcttcggtaagctttcactggcggcgacccggtctactgaagcgggcggctcttacaccttcagcagccagaatatttatgatgaagtgaaagataccgctaacgacgtctttgacgtacgtctggctggtctgcaaacgaacccggacggcgtactggagctaggcgttgattacggtcgcgccaatacgaccgatggttataagctggctgatggggcatcgaaagacggctggatgttcaccgccgaacacacgcaaagcatgttgaaaggctataacaagtttgtcgtgcaatatgccaccgatgccatgaccacgcagggtaaaggccaggcgcgcggttccgacggttcttcatctttcactgaagaattgtctgatggaaccaaaattaattacgccaataaggtcatcaataataatggcaatatgtggcgtattttggatcatggcgccatctcgcttggtgataaatgggatttgatgtacgtcggtatgtaccagaatatcgattgggataataacctgggtactgagtggtggaccgtgggtgtacgtccaatgtacaagtggacgccaatcatgagcaccctgctggaagtcggctacgacaacgtgaaatctcagcagaccggcgatcgtaacaatcaatataaaatcaccctggcgcaacagtggcaggcgggcgacagcatctggtcgcgtccggctatccgtattttcgccacctacgcgaaatgggatgagaaatggggctatatcaaagacggcgataacatttcccgttatgccgcagcgactaactccggcatttccaccaacagccgtggcgatagcgatgagtggaccttcggcgcccagatggaaatctggtggtaatacgatggtcatctgacgtaacgaggggcgcaagcccctcggaaacatcaggtctgatgatgcttgtaagccgaataaggcgccagccgccattcggcgatatgtttgggttggcgcgctattgcctggctaccgctgaacccgccttattgaggtgagaataatgaaaatgaagaaaagtctcgtcgccctctgtttaaccgcagggctgttcgccagcgtgccgggtatcagcctggcggaagtgaactatgtaccgcaaaataccagcgccgcgcccgttattcctgctgctgcgctacagcaattaacctggacgcctgtagatcagtcaaaaacgcagtctacccaactggcgactggcggccagcgccttgacgtcgccggcattaccggcccggtcgccgcttatagcgttccggcgaatatcggcgagctgacattaactctgaccagcgaggtcaataagcaagccagcgtttttgcgccaaacgtgttgattcttgaccaaaatatgacgccttcggcgttcttccccagcagttactttacttatcagcagccgggcgtcatgagcgcagaccggctggaaggcgtgatgcgcctgacgcctgcgttggggcagcagaaactctatgttctggtgtttacgaccgaaaaagatcttcagcaaaccactacgctgctcgatccggcaaaagcctatgccaaaggcgtcggtaactctatcccggatattcccgatccagttgctcgccataccactgacggcgtggtgaaactgaaggtgaaaaccaacagcagctccagcgtattggtcgggccgttgtttggctcgtccggtaccgggccggtaacggtaggcaataccgccgcgccggtcgctgcgccagcgccagtcgcgccgaagaaaagcgagccgatgttgaacgatacggaaagctactttaataaagcgattaaggatgccgtagcgaaaggcgacgtcgataaagcgctgaaactgcttgatgaggccgaacgtctgggatcgacatctgcccgttccacctttatcagcagtgtaaaaggcaaggggtaattatttccccacagtgctgattttgcagcaactggtgcgtctcctggcgcacctttttttatcatttcatgcgaattgttatttttttgttgcgcaacagatcacttaattgtgattgcgccccccgtaatgtcttttctgagatacaatgactttaggttatgaatcggagagtaaggcatgtcacaccctgcgttaacgcaactgcgtgcgctgcgctattttgatgcgattcctgcgcttgaaccccatttgctggactggctgttgctggaagattctatgactaaacgttttgagcagcagggaaagcgggtaagcgtgacgctgattcgggaagcgtttgtcggccaaagtgaggtcgaggaagcatcaggtttactgccatccgagtcccgctactggttacgtgagatactgctttgcgctgacggcgagccctggcttgccggacgtaccgtggtaccggaatccacgctgtgcggacctgaacaggtcttacaacatctgggtaaaaccccgcttggacgttatctatttacatcatcgacactgacccgcgattttattgaaattggacgcgatgcaacgctgtgggggcgccgctctcgactgcggttgagcggaaaaccgctgttgcttaccgagctttttttacctgcatcgccgctgtactgagaggaagataaagatggagtggagtctgacgcagagtaagctgctggcgtttcaccgtttgatgcgtacagataagcctattggcgcgttgctgctgctctggccgacgctttgggcgctatgggtggcgacgccgggtatgcctcagctgtggattttggcagtttttgtcgctggcgtgtggttaatgcgcgcggcgggctgcgtggtaaatgattatgccgatcgtaaatttgacggacatgtaaaacgtacggtcaaccggcctttacccagcggcgccgtgacagagaaagaagcgcgcaacctgtttgtggtgctggtgctgctggcgtttctgttggtgctgacgctgaacgccatgacgattctgctttccgtggcggcgctggcgttggcctgggtttatccctttatgaaacgctacacccacctgccgcaggtcgtgctgggggccgctttcggctggtcaatccccatggcgttcgccgcggtgagcgaatccctgccgttgagctgctggctgatgttcctcgccaatattctctgggcagtggcttacgatacgcaatatgcgatggtcgacagagatgatgatatcaagataggcattaaatcgacggcgatcttgtttggtcgttatgacacattgattatcgggattctgcagcttggcgtcatggcgttaatggcgctgatcggctggttgaatggtctgggatggggatattactgggctgtgctggtggcgggcgcgctgtttgtctaccagcaaaaactgattgcgaaccgtgagcgtgaagcctgctttaaagcctttatgaacaataactacgttggcctggtgctatttttagggctggcgatgagttactggcacttctgatgtcatgccgggcggacccggcctacaaagccaaaattttcaatacgtcatatcagttgcccgataagcttacgccatcgggcatttcaggcactggcttactcgccctgcgtcgcgctttcaatcgtcagacggacatcagaggtaatcagatcggcaagcatctgatatatcttcatcgtttctgccggttcggcatcgcccgtatcactgatataaccctcatcccgtagcgtcaacacgagtgaactgaacaccgctttgtcgaaaaactccggcgcgttaataccgtgcaggacagacagacgttgcgccacggtacggctttctttctccagcgtactgcggttgatggacggattggcgctcaacagccagaacgtaatggcataacgctgtagcgtttcgcgcgcgcctgccgccagcagttgcagcgtaccggaatgcgtcgggttgatatgcagttcatcatcctgcagggtaattagcccctgacgctgcatttcactggccagcgcgtcaatgaccgaggctaactcctcgcgctcccagcgcaggaacagctccgcttttaacatcggatagagcgcttcaacatgctgctgcaacgcatcacgcgaaatgcgacgatgctgggtgataatcgccgccatcagcgaaggcataatcaacatatgcgcgatattgttacgatagtaggtcatcaacaccgcctgctcgcgcggcagaatgatgatatcgccaatggtgtctttctcgacctcaaacttattcatctgcagcgcgtgagcgataagctcgccagcgctggcggcaggaacggttgagtctgtggaataagggacattgcgcatcagatcgagatagcaatcaagctgctcggtgagctgctcgcgggtgagcgagcgctgacgcgacgctaacagcgcggtacaacacaggttcatcgcgtttgccgcgccagcgttgttaatacgcaccatcagatcggcggcgatactatttaccgtcggcgtcagccaggctgggcgtatggcctctatagggtcgatagattcgcgccactccggcacatgctggttcaggtacgtcatgagcggcatcggttcgccaaagttaacgtagccctgacccagattgcgcagcttgctcaagcctttcagcatctgcggcaggctctctttctcttttgtcgcgccgcgcagttctttcgcataggtgcccacttccatgacgtgctcatagccgatgtaaataggcactaacgtaattggacgggtaccgccgcgcagcatcgcctggatagtcatcgacagggtgccggttttcgggtctaacaaacgtccggtacgcgaacgtcctccttcgacaaaatactcaaccgagtaaccgcggctgaacagttcgcccaggtattcgcgaaagacggtggaatagagtttattccccttaaaggtgcgacgaataaagaacgcgcccagacgacggaaaatcgggccagcgggccagaaattaaggttaataccggcggcaatgtgcggcggaaccagtccctggtgatacagcacataagaaaggagcaagtagtccatatggctgcggtgacagggtacatagacgatttcatgcccgtcgtgcgccagttggcgtacgcgctcggcgttatgcacgttaattccctggtaaagtcggttccaggtaaaccccaaaatcctgtcggtcaaacgaatcatctcgtaagagaagttcgccgcgatctcttccatcagcgcaatggcgttttgctgcgctttttcatgagagatttttttactgcgcgcttcgtcttctaccgcgcgggcgatcgctttcgaggccagcagtttgttaaacagatcctgacgggcaggcaggcgtgggccaaccgccgccaggcgctggcgagcaaagtgcatacgcgccacgcgagccagcttctgcgcgatgattttatcggtgccgtgttcatcagccatacgacgcaatgagacggacggcgagaatcggacaaagctatcgcgacccagccaggagatggcaaagaatttctgtacgccgttcagcatacgtaaaggcgggttatcttctcccttttcacgacccggcgcgcggccaaacatcacggaaacgggcaccatctgcacgtccaaagccggattactccgatgcagatcgagataatcgtgaaaaagtttcaccgactcttcttttggcgtgtaataggtaaagacacgcggtccgccgtgaataaatacatagcgtggcaacagcgcgccgtcgatctccagcggctccagcggatccgggagatcgtgcgccagacattgcgcccgcagcgtcagtaagtccgcttttgagttgtatggcaagacatacataatggggcgagaagtatcgagccccaattcctgggcgggttccgccggaatagacttgctttttaccagtatgcttaatggtaaattcagtaatttgtagtaaattcgtggccagccggacataaacgatgtaaagcctctggttaataatgcaaatgcggtgcaaggatatcagaaagtttagcgaatttctgttgtatcccgtcatacttcgcgctgcgttacggcagtccgaatcgtgcagggcaaccgtataatgtcattgacgttaataatgtaaaaaggttcttttgatggccaataataccactggattcaccagaattatcaaagcggcaggatattcctggaaaggatttcgcgccgcatggactcacgaagcggcgtttcgccaggaaagcctcgcggtattgctgggcgtcatcatcgcctgctggctggatgtggatgcgattacccgtgtgttattgataggttccgttttacttatcatgattgttgaaatcctcaacagcgctattgaagcggtcgtggaccgcatcggttctgaataccatgagctttccggccgtgcgaaagatatgggatcggctgcggtgctactgtctattttcgttgccctgatgacctggggcatcctgttatggtcacattttcgataaaggttccaaattttataaatctcttgttttttgcgccgtttgtggttccaaaatcacctttaactgtatatactcacagcatgattgtatatacacccagggggcggaatgaaagcgttaacggccaggcaacaagaggtgtttgatctcatccgggatcacatcagccagacaggtatgccaccgacgcgtgcggaaatcgcgcagcgtttggggttccgttccccaaacgcggcggaagaacaccttaaagcgctggcgcgcaaaggggtgcttgaaatcgtttccggcgcatcgcgaggtatccgtctgttacaggaagaagaggacggattaccgcttgtcgggcgtgtcgcggcgggtgaaccgcttctggcgcagcagcatattgaaggccattaccaggtcgatccttcgctgttcaaacccagcgccgatttcctgctgcgcgtgagcggtatgtcgatgaaagacatcggtattatggatggggatttgctggcggtacataaaacgcaggacgtccgtaatggccaggtggttgtcgctcgcattgatgatgaagtgacagtaaaacgcctgaaaaagcagggcaataaagtggagctgctgccggaaaacagcgagtttacaccgatagtggtggatctgcgcgaacaaagctttacgattgaagggctggcggtaggcgtcattcgcaacggggaatggttgtagtctctttttaatctccttgtaagccgccatccggcaatcgtgtagcctgatggcgctgcgcttatcaggcctacgggaatgcagttcctgagatgattaatttgtaggccggataaggcgttacgtcgccatccggcaatgcgctcgtttcgtttaactccttgtcaggcttttctccatgccgctttttacctcctctgataaagctctctggcgtcttgcgttgccgatgattttttctaacatcaccgtccccttactggggctggtcgatacggcggtgattggtcatctggacagccctgttttcctgggcggcgtggcggtgggcgcgactgccaccagctttcttttcatgctgctgctatttctacgtatgagcaccaccggcctaacggcgcaggcatttggcgccaaaaatccgcaggcgttagcccgggcgctcattcaaccgttattgctggcgctgggcgcaggcgtgatgattgtgctatttcgcacgccgcttatcgagctggctttacatattgtcggcgggaacgacgctgtcctggtgcaggcgagacgcttccttgaaattcgttggctaagcgctcccgcgtcactggcgaatctggtgctgctcggttggctgttaggcgttcagtatgcgcgggcgccggttatcttgttggtcgtgggcaatatcctcaatatcgcgctcgacctgtggctggtgatggggcttcatatgaacgtgcagggtgctgccctggcgacggtcatcgcagaatatgtcacgttactgatcggcctcatgatggtacgtaaagttctccatctccgcggtgtgtcgctggatatgctaaaacaggcctggcgcggcaacgtgcgccgccttttggcgctcaatcgcgatatcatgctgcgctcattgctccttcagctttgttttggcgcaatcacggtgtcaggcgcgcggctgggcagcgatattatcgcggtaaatgcagtcctgatgaccttactcacctttacggcctatgcgctggacggttttgcttatgcggtggaggcgcactccggtcaggcttacggcgcgcgtgacggtagcaagctactggacgtctggcgagcggcgtgtcgtcagtcaggaattgtggccttgttgttttccacagtctatgccctggcaggcgaacatattgtcgcgttactgacctcattgccgcaaatacagctactggcggatcggtatcttatctggcaggtggtattaccgctggtgggcgtatggtgctatctgctcgacggtatgtttattggcgcgacgcgcgctgccgaaatgcgcaatagcatggcagtcgccgcgggaggattcgcgctgacgctcttcgccctgccggtattaggaaatcatggtttatggctggcattaaccgtgttcctggcgcttcgcggtctgtcgttgagccttatctggcgtcgtcactggcgcgagggtacatggtttgccagatcgtgacggttaaaaattctgaatataaaaccgaaggccgaattcctgcctacaattattatcacgtccagcagaaattgcagagcatttgggcgaataacacctgctattcctaaccgaatgatgaggacaagatgatgaataaagacgaagccggcggtaactggaaacagtttaaaggtaaaatgaaagaacaatggggcaaactgaccgatgacgatatgaccgttatcgaaggtaaacgcgaccaactggtaggtaaaatccaggagcgttacggttaccagaaagatcaggcggaaaaagaggttgttgactgggaaacccgtaacaactatcgctggtaatatgttttcccctaccaggagtacatggatgtgcttccccctgtttgcttatgaatgcgggcgtgcccctctctactgccgcccgttttccgttcaggctaacgtggttttttcttcaccagcaccgagtgatcgtgaccacagtttcccggatggcgacacgcttctacttctacgcacgcagggcacagaccgtgcgcctcaataacgttatgtcgtagcgcaaagcccattttagccgccagcgtatgcatgatgtcttccacgccctcggcacactcttccttcaccacgccgcaacgatcgcagataaacatggccgagctgtgcgtcggctggtcgaacaggtggcaaaccacataactattggtggattccactttatggacaaaaccctgttcgagcaaaaaatccagcgcgcggtaaatggtgggcggtttggcctgtggttccgtttcgcgcagcaaatcgagcaaatcgtatgcgctgatggcaccctgttgcagactcatcaggcgcagcacttcgaggcgctgaggcgtcaggcgcacgttgcgctgcgcgcagagtttttcagcttgcgccagtaactcttgcgttgtggtcttttccatgtagcacctcgaatggcatgaaagtctaatccgttactttaccacgagctgcttaaaactctgaaattaccccgcgacaatatatcgcctgctaagcttttccgcgccagtattctcatctatacataatgagggtcgatattataacaacaggatttaacatcactatttcacagcaatagttcgcctctgtccggtaaagcgtggcggaggaattacttcacctgataataagatgggctaactgtgaacaaaaacgtcaaactttcactgattgctatcgcggtctcgctttttatggcaaagcaggcgagcgccgccaatacctggacggaagcgcgtaatgacgcaatgggcgggacgggcgttgcgtccgcgaattatggcagcggagtactattaaatccggcgttactggcaaaagccaaaccggaagacaatatcactgttgtccttcctgcggtcggcgtccagattacggataaagacaatctccaggatgaaattgacgatatcagcgataaagtggattactacgatgaggtcgtcgataaccttacgctggggcaaattctgctcaatccgcgaggcgtgctgaatcaatttcagggcgccgcgcgcgacctggccgatgagctggaatatctcaacggaaaaaccgcccgcgccaatgccggcgccgggttggcggtaagtattccagggcaaacgctttccgtggcgtttatcgccaaaggttatgcgcatgggcgcgtgagttcgtccattgatcagaacgatattcagtatctgcgcgatatccagcatgatgaacgtgtcgcgcttcgtgaagcaggacgcgctgctttgctggggtctgacgaaattacaaagcatttaaactctaccgcgtcggggcgggtagcgattgtatctgactacggtattgcgctggcgaagcagtttgtggtgggcgaggtgcctgtttccattggcgttacgccaaaactgcaaaaaacctggctctataactacaccacctcaatttataactacgacagtagcgactggaatagcagccgttatcgcaatgacgatacgggttttaacattgatgcggggcttgctgccgatatcggtgaaaactggacgctgggggtgagcggacaaaatctggtatctcgcgatatcgatacgaaagatatttacatcactaatggtatgacgggagaaaccaccaactacaaagatacataccaaatccgccccctggttaccgcgggcatcgcatggcataacgatttgctgaccgtaagcgccgatggcgatctgacggaaacgaaaggctttaagagcgaagacaattcacagtacgttggcgtcggcgctgaagttcgaccgttgtcatggctggcggtgcgcgcagggtatcgtgcggatgtgaaaaataacgatagcaatgtggttaccggcggtcttggctttgcgccctttaaccgtgtgcatctcgatttaatgggactgtacggcgaagatgaaacctggggggcaggcgcgcagcttacaatgacattctgaggtgctttcaccggaggcgctacgcctccggtttagcgttatgctatagtaacgccccttttttaaccggatgcttatttattcgccatgcagcctgaaacccagtcctccgctttacctgcttatcgcttctccatcgcgcctatgctcgactggacggacagacattgccgctatttcctgcgtttgctgtctcgccagacgcagctctacaccgaaatggtgaccacgggcgcgattattcacggtaagggtgactatctggcttatagcgaagaagagcatccggtcgctctacagcttggtggaagcgatccggctcagcttgcgcattgtgcaaagctggcggaagcgcgtggctacgatgaaattaacctcaacgtggggtgcccttccgatcgcgtgcaaaacggtatgtttggcgcctgtttgatgggcaatgcgcaactggtcgccgattgtgttaaagccatgcgtgatgtcgtctcgattccggtgacggtaaaaacccgcattggtattgacgatcaggacagctatgcgtttctgtgtgatttcatcgatacggtttccggtcagggcgaatgcgagatgtttattatccatgcgcgcaaagcctggctttctggcttaagcccgaaagaaaatcgtgagatcccgccgctggattacccgcgcgtctatcagctaaagcgggattttccgcacctgaccatgtccattaacggcggcatcaaatcgctggaagaggcgaaggagcacctgcgccatatggatggcgtcatggttggccgcgaagcttatcagaatccgggtatactggccgcggtggatcgggagatttttggcgccgataccaccgatgccgacccggttgcggtggttcgcgcgatgtatccctatattgagcgtgaattgagccagggagcgtatctggggcatatcactcgccatatgctggggttgttccagggcatccccggcgcgcggcagtggcgtcgctatctgagcgaaaacgcccataaagctggcgcggatgttgctgtactggagcaggcgctaaaactggtggcagacaagcgttaaaagttcgccaaaaattagtcaatctcaccacgccctgtgcagtcttgcagggcgtttttcttatatatcaataatataaatattggcatgatttttgtaagggcttacctgaccagacccggtaagcgccgtgccgccgggcaatgccatttttatggggagcgactatgctggaactactttttgtgcttggcttttttctgatgttaatggtgacgggcgtctccttgctgggcattctggccgctctggttgtagcgactgccgtcatgttcctgggcggaatgttcgccctgatgatcaagctgttaccgtggctactgctggcggtggctgtggtgtgggtgatcaaagcagtaaaaacgccaaaaatcccacagtatcagcgcaataaccgtcggttttactaaggtattgagcggttcgtcacaacctggaactttgccctcacaagcaaataggaatcgattattaaatctgtcatgattgcgcaggtaacgaattcatcgcgctgtaccctacatacagccgaacaaaaaaagaaagggcttcccgggtggaagcccaatttctttgcagagctattacggaatcagcaggcttgagccctgtgtggcccggctttccagcacttcatgcgcgcgacgggcatcttttaacgcatagcgttgattttcagccacatcgactttaatcacgccgctggcgatcaatgagaacaattcattgctggcttcggtcagttcttcacgtgtcgtaatatacccctgtagtgaaggtcgcgtggcatacagggaacctttctgattcagaatacctaaattcacgccggtgacggggccggacgcattgccgaaactgaccatcagtccccgacgttgcaggcagtccagtgaggcctcccaggtatctttccccacggagtcatagaccacgcggacttttttgccgccggtgatctcttttacccgttcgacaatgctctcctcacggtaattaattacctgccaggcaccggcgtccagcgcccgctgcgctttttgcgcgctaccgacggtaccgataagcttcgcgcccagcgcttttgcccattggcaggcgatcagaccgacgccgcccgcagcggcatgaaacaggaagggttcgtcgggtttcacttcataggttttgcgcaacaggtaaaaaacggtcaatcccttgagaaaagaggctgccgcctgttcgaaagaaatggcgtcaggcaaaatcgcggctttatctgcggtgacgttatggacggaactgtaagcgccgagcgttgactgcgcgtagacgacgcgatcgccgacgcgaatgtgctccacgccgttgccgactttactgaccacacccgcagcttcggttcccaggcccgcaggcaacgacgggggcggatagagtccgctacggatataggtgtcgatgaagttgataccaatggctttgttctcaacctggatttcgtgttccgccggttccgctggcgtaaactccacggtctgaagcacttccggaccaccatgcttgtgaaattcaatacgcgttgccatgcttcctccaaaagaaatgtggtaatctttcgacccaatcactatctcggtaactccattcactatggcaggaaataaacccttcaacaaaccacagactgatgcccgcgaccgcgatccgcaggttgccgggataaaagtgccgccgcactcgattgaagcggaacagtcggtgttgggcggtttaatgctggataacgagcgctgggacgatgtggccgagcgcgtggtggcggaagatttctatacccgcccgcatcgccatatctttacggagatggggcgcttgcaggaaagcggcagtcctatcgacctgattacgctcgcggaatcgctggagcggcagggccaactggacagcgtcggcggtttcgcctatctggcggagctgtctaaaaacacgccaagcgcggcgaatatcagtgcttatgcggacattgtgcgcgaacgcgccgtggtccgcgatatgatcgcggtggcgcatgaaattgcggacgccggttacgatccacaggggcgcaatagcgacgaactgctggatctggcggagtcgcgcgtcttccagatcgcggaaaaccgggccaacaaagacgaaggtccgaaaagcatcgaccagattctcgacgccaccgtggcgcgtattgagcagttgttccagcaaccgcacgatggcgttacaggcgtggataccggctatcaggatctcaataaaaagacggcagggttacagcgttcggatttgattatcgtcgcggcgcgtccctccatgggtaaaaccacttttgcgatgaacctctgcgaaaatgcggcgatgttgcaagataagccggtactgatctttagtctggagatgcccggcgaacagatcatgatgcgtatgctggcctcgctgtcccgcgtcgatcagacacgtattcgtaccggtcaacttgatgatgaagactgggcgcgaatctccggcacgatgggcattctgctggagaaacgcaatatgtatattgacgactcctcaggtcttacgccgacagaagtccgttcgcgcgcgcggcgtattttccgcgaacatggcgggttaagtctgattatgatcgactacctgcaattgatgcgtgtgccgtcgctttctgataaccgtactctggaaatcgccgaaatttctcgctcgttgaaagcgctggcgaaggaactccaggtgccggtcgtggcgctatcgcagcttaaccgctccctggaacaacgcgcggataaacgtccggtgaactccgacctgcgtgaatccggctctattgaacaggatgccgacttaattatgtttatctaccgtgatgaggtttatcacgagaacagcgacttaaaaggcattgctgaaattattattggtaagcaacgtaacggtcctatcggtacggttcgtctgacgttcaatggtcagtggtcgcgcttcgataactatgcgggaccgcaatacgatgatgagtaactctccgtcattcttttaacaaggaattcaaatgcaagcggcaacagtcgtcattaaccgccgcgctctgcgacacaacctgcaacgtctgcgtgaactggcgcctgccagtaagctggttgcggtggtgaaagcgaacgcttatggacacggtcttctggagaccgcgcgaacgctccctgatgctgacgcttttggcgtggcgcgtcttgaagaggctctacgtctgcgagcgggcgggatcacgcagccaatcctgctgctggagggttttttcgacgccgccgatttgccgaccatttccgcgcaatgtctgcataccgccgtacataatcaagagcagcttgccgccctggaggcggtggagctggcggagccggtaacggtctggatgaagctggataccggtatgcatcgtctcggcgtgcgtcccgaagaggcggaggcgttctaccagcgtctgacgcactgtaaaaatgtacgccagccggtgaatatcgtcagccattttgcccgtgcggatgagccggaatgcggcgctaccgaacatcagctcgacatttttaatgccttctgtcagggtaaacccggtcagcgctctattgccgcgtctggcggtatcctgctgtggccgcagtctcactttgactgggcgcgtccgggcatcattttgtatggcgtatcgccgctggagcacaaaccctgggggccggattttggttttcagccggtgatgtccttaacctccagtttgatcgcggtgcgtgaccacaaagcgggcgaaccggtgggctacggcgggacatgggtgagtgagcgcgacacgcgcctgggcgtggtggcgatgggttatggcgatggctacccacgagcggcgccttccggtacgccagtactggtcaatggtcgtgaagttccgattgtcgggcgggtggcgatggatatgatttgcgtagatttggggccaaacgcgcaggataacgcgggcgatccggtggtcttatggggtgaaggtctgccggttgaacgtatcgctgaaatgacaaaagtaagtgcttacgaacttatcacgcgcctgacctcaagggtggcgatgaagtatattgattaaatacgcggcgggccgggtggcgcttgcgcttatccggcttgtatcgcgcattggctgtaggccggataagacgttcacgccgtcatccggtaatatgcgcatccaccacaacatcctctcgatcttctcgtccttccggtttattgtgttatttcctgccctctgtaaacctggagaaccatcgcgtgtttcaaaaagttgacgcctatgccggcgatccgattctttcactgatggagcgttttaaagacgactcccgtcacgacaaagtgaatctgagcattggcctgtattacaacgaagacgggattatcccacagcttaaaacggtggccgaagccgaagcccggcttaacgcgcagccgcatggcgcttcgctgtacctgccgatggaaggactcaatacttatcgccatactatcgcgcctttgctctttggcgccgatcacccggttcttcagcaacagcgcgtggccactatccagacattaggcggctccggcgcgctgaaagtaggcgcggatttcctgaagcgttatttccccgacgcaggcgtatgggtgagcgaccccacctgggaaaaccatattgcgatatttgccggggcaggattcgaagtgagtacttacccctggtatgacgacgcgactaacggcatccgttttaacgatctgctggccacgctgaatacgttacctgcgcgcagtatcgtgttgctgcacccctgttgtcacaacccgaccggggcggatttaacgccttcgcaatgggatgcggtgattgaaatagtgaaagcgcgcgatctgattccgtttcttgatattgcctatcaggggtttggcgcaggcatggacgatgatgcgtacgttattcgcgccattgccagcgctgggttacctgcgttagtcagtaattctttttcgaagattttctcgctgtacggcgagcgcgtcggcggcctgtccgtggtgtgtgaagatgctgaaatcgccgcgcgggttctgggacagctaaaagcgacggtgcgccgaatttactccagtccgccgtgtttcggcgctcaggtggtcgctacggtcctgggcgatgaggcgttaaaagcgggctggctggcggaagtcgacgcgatgcgtaaccgcattatatcgatgcgccagacgctggtgaaggagctgaaggcggagatgcctgaccgcaactttgattacttgttacagcagcgcggtatgttcagctataccgggttaagcgaggagcaggtcgatcggttgcgcgatgagtttggcgtttacctgattgccagtggccgcatgtgtgtcgccgggcttaatgcttcaaatgtacaccgcgtggcgaaggcatttgccgctgtcatgtaatattcaggccggacggcgataacagtgccctccggcctgacaatagctgttgtgatcatcctcttttttcgtaacaaaaccgcagataatccttccttttgaccgttactggcgttatggtcagatagttttttgagcaaagactcatcttaataattataatattttgaattttaagggaaaaccatgaaaaaaataaccctggcgctgagtgccgtctgtttgttgtttacgctaaaccattccgcgaatgcgttagtatcttccccttcgacgctcaatccgggcactaatgttgcaaaactcgcggaacaagcgcctgtccattgggtctctgtcgcccagattgaaaacagcctcaccggacgcccgccgatggcggtcggctttgatattgacgacaccgtgttattttccagccccggattctggcgcggaaagaaaacctactccccggacagcgacgattatctgaaaaatccggccttttgggaaaaaatgaacaacggctgggatgagttcagtattccaaaagaagtggcccgacagctcattgatatgcatgttcgccgtggcgacagtatttactttgtcactggtcgtagtcagacgaaaacggaaaccgtgtcgaaaacgctggcggataacttccatattccggcggcgaatatgaatccggtgattttcgccggcgataaaccggaacaaaatacgaaagtacagtggctgcaggagaagaacatgcgtatcttctacggcgattcggataacgatattaccgcggcccgtgattgtggtatccgcggtattcgcatcctgcgcgcggctaactccacctacaaaccgctgccgcaggcaggagcgtttggcgaggaagtcattgtcaactcggagtactaaaaatcaggagagcgacaggctctccttttttgcatgatttttgcacaaacttgccccgctggcttttaccttttccagacttgctgcacactattcaggagacgtttgtttttaggaaggagcagcctatgtggtatcagcgcaccattacactgagcgagaagccgcgcgggtttcatctgataacagatgaaattaccgataaattgtctggcttaccgcctgtcgaaacgggtttgctgcatctgttgttgctacatacctcggcctcgctgacgttaaacgaaaactgcgatcccaccgtgcgcgctgatatggagcgccatttcctgaaaaccgttcccgataatgcggcgtatgaacatgattacgaaggcgcggatgacatgccttcgcatattaagtcgtcagtattgggcgtctcgttgctgctgcctgtacgccaggggcgtttacagttaggaacatggcaaggtatctggttgggagagcaccgtattcacggcggtccacgtaaaatcatcgcgacactacaaggggaatgataatgaccatttcggaattactgcaatactgcatggcaaaacctggcgcagagcagagcgtccacagcgactggaaagcgacgcaaattaaagtggaagatgtacttttcgcgatggtaaaagaagttgaaggacgcccggcagcctctctcaaaaccagcccggaactggcagagttgttacgtcagcagcacagcgatgtacgaccgagtcggcaccttaataaagcgcactggagcacggtctatctggacggctcgctgccggattcacaactctattatctggtcgatgcctcttatcaacaggcggtaaatgcgctgtcggaagataaacgcaagcagttgccgcagtcctgattatagcgcgccgaccaacaacgccagggcgatatcaatgaggcggatgaccgtagaccggatacggctgccgagggcgatttgcgcattattggcgcgtagcctggcgaggtcccgctgtccttccagcagaataatcatatcgtcgtcgtccagccagccgcgagcatgttcctgaagcgcgcgggcgataaacgcggcggactcgcggatagcgtcgtcgctgtcttctcttgcctgcttatacgtctggataaactcggcaatcgccgaggacgctacagggtgttcggcctgggcggtggttatcaggtaatgtatttcgttaatagacgccattttcatctccctgagtgcagcgggcgccccaatgcagacactcgccctgtatggctaatttccagacctgattattttgctgttggtatctctcagcctggatgtaagtaagtggttgcttacgtcgcataacccgcgcataaagacgcaaatagtgatttttcagcagcgccagattatcgagacggtgtttatccccaccttgacgggcgacccgctcagcctgaaaaaatatctggcggatatcgcggtcatccttgagcagtgtctctttttgccacggtattcgcgccgcgtcctgcaggaagcgggttgagcgcgcttgtaatagcgttagttgttgaaaagccacggcgctaaagcggtcaggcagcgtacaggcggataaaaacaggcacagcagtagtgtgattgcgtagggcaacttcatggtgttttccataacagaccgtttgcgctatcacatgtcagagcgaggcggcacgcaaatcacaaatgctcaacacggatacaatgaggtgggatgaggaaaaatgatgccgcttcccggcgaatcggaaagcggcgtgaaggttatttgagcataggtttaaggaagcgggcggtatgcgacgcctcgcactccgccacggtttccggcgtaccggcgacgagaatttcgccgccgccgctgccgccttccgggccgaggtcgacaatccagtccgccgttttaatgacgtccaggttgtgttcgatcaccacgatggtgttgccctgatcgcgcaactgatgcagaacgtcaagcaactgctgaatatcggcaaagtgcaggccggtggttggctcgtcgagaatatacagcgtctgcccggtgccgcgcttcgacagttcgcgcgccagcttcacgcgctgggcctcgccgccggaaagcgttgtcgccgactgaccaagacggatataggtcagccctacgtccatcagcgtctgcagcttacgcgccagcgccggaaccgcatcaaagaactcacgcgcttcttcaatggtcatatccagcacttcgtggatggtcttgcctttgtacttaatctccagcgtttcccggttatagcgcttgcctttgcactggtcgcacggcacgtaaatatccggcagaaagtgcatttcgactttaatgacgccatcgccctggcacgcttcgcagcgaccgccgcgcacgttgaagctgaatcgccctggcgtgtagccgcgcgagcgagactccggcacgccagcaaaaagctcgcgaaccggggtaaagacgcccgtataggtcgccgggttggaacgcggggtgcgcccgattgggctctggtcgatatcgatcactttatcgaaatgttccagcccctgaatatcccgatacggcgccggttcggcgatagtcgccccgtttaactgacgctgggcgatggggaacagcgtgtcgttaatcagcgtcgatttaccggaacccgagacgccggtgatacaggtaaacagccctaccggtagcgtaagggtcacatctttcaggttgttgccgcgcgcgccggtgagtttgagcactttttctggatttgccggcacgcgttgtttcggcacttcaattttgcgtttaccgctcatgtactggccggtcagcgattccggtaccgccataatggcttccagcgggccttccgccaccacctcgccgccgtgaacgcccgcgccggggccaatatcaatcacatggtcggcggcgcgaatggcgtcttcatcgtgttccaccacaatcacggtattgccaagattgcgcagatgaatcagcgtacccagcagccgttcgttatcgcgctggtgcagaccgatggacggctcatccagcacatacatcacgccgactaacccggcgcctatctggctcgccagacgaatacgctgggcttcgccgccggaaagcgtctctgccgagcgggagagcgtgagatagttcaggccgacgttcaccagaaacttgaggcgatcgccgatctcttttagcactttttcggcgattttcgctcgttgcccggaaagcttgagattagtgaaaaaatccatcgcatggccaatgctcatatcagaaatagcaggcagcggcgtattttccacaaatacatggcgcgcttcgcgattcagtcgcgtgccttcacagctggcgcaggggcgattactgatgaacttcgccagctcttcgcgcaccgcgctggattccgtctctttataacggcgctccatattatgcagcacgccttcgaacggatggcggcgcacggaggtatcgccgcgatcgttcatatatttaaattcaatgttctctttgccggaaccgtacagcacgactttatgtacgttggcgctgaggcttgcccacggcgcatctacgtcgaacttatagtgttccgccagcgacttgagcatttgaaagtagtaaaaattgcgacgatcccaaccacgaatcgcgccgcctgccagcgacaggtcgggattctggatcacgcggtccggatcgaaatattgctgaacgccgaggccgtcacaggtcgggcaggcgcctgccgggttgttgaacgagaacagacgcggttccagctcgcgcatactgtagccgcaaatcggacaggcaaaattggcggagaacagaagctcctccgctttctcatcgtccatatcggcaacaaccgccgtgccgccggataattccagcgccgtttcgaacgactccgccaggcgttgggaaagatcgttgcgaactttgaagcgatcgatcaccacctcaatggtatgtttcttttgtagctccagcttcggcggatcggagagatcgcagacttcgccgtcaatacgggcgcgaatgtaaccctggcttgccagattttccagcgttttggtgtgttcgcctttacgctctttaataatcggcgcgagcagcatcagacgtttgccttccggctgtgacagcacgttatcgaccatctggctaacggtttgcgccgccagcggcacgtcatgatccggacaacgcggctcgcccacgcgggcaaacagcaggcgcaggtagtcgtggatctcggtaatagtacccaccgtagagcgcgggttgtgcgatgtcgatttctgttcaattgagatcgcgggcgatagcccctcaatatggtcgacatccggtttttccatgagcgacaaaaactgccgcgcgtaagcggagagcgattcaacgtaacgacgctgcccttcggcatacagagtgtcgaaagccagtgaggatttgcctgaacccgaaagcccggtcacgacaatcagtttgtcgcgggggatgacgaggttaatatttttgagattatgggtgcgggcgccccgaacttcgatcttatccattcacctttcccggtagagactcggatgcctggtttgtttgaaggacaaacggcagaaacggctaattatgacacaatttaacctgtttgaatatacagtattggaatgcatcttcagctaaagtatgcaacaatatgaggttcgcgcgagtgacctggaacctgcatcgcagctattaaaatgctacgtggaaatggtacactcacgcgtttacactatttatgaaacgtattcaggagactcaattatggccagcagaggcgtaaacaaggtgattctcgttggtaatctgggccaggacccggaagtacgctatatgccgagtggcggcgctgtcgccaacttaacgctggctacttctgaatcctggcgcgataagcagaccggcgaaatgaaagagcagactgaatggcaccgggtggtgatgttcggcaaactggcggaagtggccggcgaatatctgcgtaaaggttctcaggtgtatatcgaaggtcaattgcgtacccgcaagtggaccgatcagagtggccaggaacgctatacgactgaaattaacgttccgcagatcggcggcgtgatgcagatgctgggtggtcgccagggcggcggcgcaccggcaggcggtcagcagcaggggggttggggtcagccgcaacaacctcagcagccgcagggcggcaaccagttcagcggcggcgcgcagtcgcgtccacagcaatccgcgccagcgccgtctaacgaaccgccaatggattttgacgacgacattccgttctgatttttggtaaaaaactcaaagcgttatttgcattttcgctatagttctcgtctgctgaaatgcctggtgtaaaccaggcattttcttacctggtattattgtctttgtatccctttcaaaaaagagaagcgcatatcttacggaaaaatgtcgcttatcgcctctggccgactcgcctcggcacatcattatccagccgaagttcataaatgtactgcaataacccggattgtcttaaatatgaaagagaaatctcatctgcaaaatatataatttatagccattttttgacaacaaaaagatattataaaataacggtagagaatggtcggtattatcaatggttaattaaatgtttgctttagcttgtgatgagctcaaatatgatatgtgtatcttgctttatttttaattgctgaagataaaattgttacttatagctggctttatataaaaaatggttttatttgtgtatttttttacacaattctgattttttactccccacttattatattttcaatgatttaagttatattgaagtccatatgaccctatgttttaattgtgaaaattaattttatcctctggaggcaaatttattaaatacgtatggttataacgcgtattaaaaagaaatatgtccttaaaatgatttagagtttcaatgattagctaacaaatctatttatcggcgggtggttttaatttgctgatgactattttttatttatgagttgagagcttatgcgatacctattattggggaggatatagttagtgcaataattgatgtctacctaattaaaaaaatgaagagtgtttttaattaaagcactcatctttgttgtgggcgcataaaaatggcgtcgttgtttttatttttctgattacgagatgtaagaaaactgaaatctataaagcgtattggtagcaggaagccaagggcggtagcgttcactttctgaataagttgagcatcctttatcctttctaatccacaaaaacattttattcacaatgtaatatcaggagacaacatggaagacgaaagtaatccgtggcctagttttgttgatacattctctacggtattgtgcatttttatatttcttatgttggtgtttgcacttaataatatgattattatgtatgacaactcaattaaagtttataaagcaaatatagagaataagactaaatctactgctcaaaatagcggagccaatgacgattcaaatcctaatgaaatagttaataaggaagtgaatactcaagatgtgtcggacggaatgactacaatgtcaggtaaggaggttggagtatacgatatcgccgatggtcagaaaactgatataacgtctacaaaaaatgagcttgttattacgtatcatggcaggctgagaagcttttcagaagaggacacttataaaataaaggcttggttagaagacaaaatcaatagtaatttattgatagaaatggttattcctcaggcagacatctctttctctgactctctacgactgggatatgaacggggaattattttgatgaaagagattaagaaaatatatcctgatgtagttattgacatgagtgttaactccgcagcatcaagtacaacgagtaaagctattatcacgactattaataaaaaggtgtcagagtgaaatatataaatcattaccgctatttgtttgtctgttttttccttgccatactccctttttttgctttatcttttcccggtataagagagtatgtttttgataacttcatggtttctgcaatttacaatggagtcattattgccatttatattacaggttctttgtgtgcattattcactattcttaaaaatatttcagcaaaagacatattaatagctcaggacgccagtagaaaaaatagcattctttctaacctcaatcaggttttgtttgccggggagtccaaacagtgtgatttcaatttactgatggaattagatgacaatgtgtctaccgcccgtaatcaacgattgtcatttattatgagctgtagcaatgtgtcgacgcttgttggcctgttggggacgtttgcgggtctgtctattacgattggttcaatcgggaacttattgagctcgccatcagatgttggcggtgataatgcaagtaatacactcaatatgatcgtgacaatggtagcgtcgctttctgaaccattgaaagggatgaataccgcatttgtatcttctatctatggtgttgtttgcgccatactcctgacctcacaaagtgtttttgttcgcagctcctattcccttgtttctacggaaatcaaaaaattaaaaatcataagcaacagagccaataataaacagcgaagcctgcgggttgaatcagagacgcttgtagaatttaaagagttgtttaaagcgttttttgataactacctgacagttgaaaacttacggacgcaggatgaagaaaagaaacgagagatgctatcagatagctttgtcactttgcaaaaccgactattggataactcagcaaaactggaacaaatttctacgctgattgatggttatctggtaagcagtaacgaaaatctcaaaaaattatctgacggtgtaataacaattacctctcgtttatctgaaggtaatatcctgcttgctgataataatgcacgactggaggcaatgagtacaatacaaaatattatagataaaaagaatgattcaataatgacatcagttgataaatgttatcaggaatctctttcacatggtaagaccataaacgatattgccgctggcagtgccgatatttctcatactctcgatgggctgagaaaagaaatggatgaggatatgaataatgttcatttagcgctatccgatctatcggctactgataaaaagattattgccaatactaaagagattagtgctgaaatggttagctaccgtgatacctatatgccattaatggaaaaaataacatctatgcatcaggaaatagtaaagcaacgtttgttaaacaaggaggaaaaaaatgaagattaagatgttttttctgacgactgcttttattacacaaagcacatacgccagcgagcttccggtcattcctctaagagatttagttaatgccgcattaacgcatcagccctctgttgctgtttcatattatgagactgaaaagaaaaacagtgacttagatctttcacgggcagcactttatcctaccctggatctaacatctggccttaataataacaggaaagagtcatcaggtaccgagaggaacgttgaaaataaggtgtctttatcataccgaataacggattttggagtgaggggggctaatatcaggaaatctgaatatgaaagagataatagtaaaactgactatgaaaaaacaaagaatatagtgtctcaggaggttgtgacaacctattacaacatcagtaaatatcgtgaaatgattgatggcgtaaatctggagaaagagttttataaaaagatgctggaaactttttcgttgctggtatcttccggtgtagctatgcaatctgatatgcgtaaagtacaagtatctatcgatgcattaaataccagaagcattatgtatcagtcgatgttggatgatgaaatgtataaaatgcagaatatgactggtctgaatttatcgccagttcagattcaaagcgatgaaaaattcaacctcttcaaaaaatatatctttgtcgaaagccctgaaaaacttatggacatggtgatgaaatacaacgatgactataagatgcttgtcaatacccgaaaagccgcgaccgaagatattaatgccgcaaaatcatcctattttccgactgtagatcttgtttccagctatgtacagaataacccgagcggtagtgccaaaaaaagtgattatgaagatgaatttaaaacgggtatcaatgtcagtttcaacatttttaatgggttcagaaattcagcccaggaaagaaaaatggtggcaagttactcgcaggctaagctgcaaattgacgattttttgattaaaacgcgttataacattgattcacaactttcaagatacgccgctgcaaaagagacttactcagtggcggaacgttcacatacaaacgcgttacagcttactgaattatatgagcaggagtttcagttagggcaaaaaagtttgcttgatttaatttcaagccgtaatgaagcatttcaggcatatgtaagcatgatcgacagcaaatatagcctgtatattttaaagctacagcaactctcattgatttttcatttaatggattatttaaaaggaaatactgaaagtgagttaaatgtaatgaaatgaatagaagacaaagcgatcatctcatgatgataattatttctttgacgatcttaattattatccttacctactttatagaaattaattcagtggttcatggtcagggcgttatcactactaaagataatgctcagttaatatctctttctaaaggagggacgatacaagatatttatgtagccgagggtgatactgtaaaaaaaggagaactccttgcaaaggtcgttaaccttgatctgcaaaaagaatatcaaaggtatagaactcaaaaagggtatctggataaagatgttaacgaaatatctttcattcttgataaagaaaatgagagtgggttgattaccctggatggcacccgttctttaagcaataaagaggtaaaagcgaatattgaattagtgcatagtcagataagagctaaagagttaaaaaaaacctctcttgattctgagattagcggattacaagagaagctgagttcgaaagaaaaagaactcgcattgcttgccgaagaaataaatattctttccccactggtaaaaaaaggaattagcccatataccaattttcttaacaagaaacaggcgtatataaaagttaagtctgaaattaatgatattgaaagtagcatcactttaaaaaaagatgatattgagttggttgttaatgatattgaggcgcttaataatgaattgcgactatctttatctaaaataatatctaaaaatcttcaggaacttgaggttgttaactctacattaaaagtaatagagaagcagataaatgaggaggatatctattcaccggttgacggtgtaatttataaaatcaataaaagtgccactactcatggtggtgtgattcaggcggcggacttactttttgaaataaaaccaaaagtaaggactatgctggccgatgtgaaaatattacccaaataccgtgaccaaatatatgtagatgaagccgttaaactggatgtgcagtcaattatccaaccaaagataaaatcgtataatgcgactatcgataatattagccctgattcctatgaggaaaataccggaggaacaattcagcgttattataaagtaattattgcattcgatgttaatgaagatgatttacggtggttaaaaccaggtatgactgttgacgccagtgtaattaccggaaaacacagcattatggaatacctgttatctcccttgatgaaaggcgtggacaaagccttttcagaaccagttaatactaaacgattagatacaccttgagagtgaatataatattatgggaaataaaagcatacaaaagttttttgccgatcaaaattctgtaattgatttatcttctttgggtaatgccaaaggcgcaaaagtttctctttccgggccagacatgaacattaccacgccgcgtggttcagtgatcattgtcaatggcgctctttattcaagtatcaaaggcaataacctcgctgttaaatttaaagataagactattaccggcgctaaaattctgggcagcgtagatttaaaagatattcaactggagagaattgacagctcattggttgattctgctcaggtagaaaagaaaggtaatggcaaacgacgaaataagaaggaagaagaggaattaaaaaagcagcttgacgatgctgaaaacgcaaagaaagaagctgataaggcgaaggaagaagcagagaaagctaaggaggctgcagaaaaagcgctcaatgaagcgtttgaagtacagaactcgtcaaagcaaattgaagaaatgctgcagaactttttggctgacaatgtagcaaaagacaatctggctcagcaaagcgatgcttcccagcaaaatacacaggctaaagcaacgcaggcttctaaacagaacgatgctgaaaaagttcttcctcaacctattaataaaaataccagtactggcaaaagtaatagcagtaaaaatgaggaaaataagctcgatgccgagtctgttaaagagccgcttaaagtcacattagcgcttgcggccgagagtaacagcggtagcaaagatgatagtataactaattttaccaaacctcagtttgtaggtagcactgctcccaatgccacggttattattaaaattaatggtattgctgtcggtcaggctgtagcggatagtttgggtaacttcacctttacagcgcctgaaacattgactgatggaacatataatctggaggcagaggccaagactgctgatgggagcggtagcgccaaacttgtcattactatcgattccgttaccgataaaccaacatttgaactttcgcctgaaagtagtgtgtccggtcataagggcttaacgccgaccttgacgccttcaattgttggtacggcggaagagaatgctaaggttgacatttatgtagataataaactggttgccagcgttgatgtcgataaagatggaaactggagttatgaatttaaggataatgaattatctgagggcgaaaatagtataaaagtcgttgctgtagataaagcaggtaataaaaacgaaacgacggatagtatcataaccgacaccattgctccagaaaagccgacgattgagctggatgatagtagtgattccggcattaaaaatgacaacattacaaatagcaccctgccaacatttattggtgtggcggaacccggttctacagtctctatttatcttggacttaaacatcttggtgaggtcattgttgctaaagatgggacatggagctatacgcttactacgccgctcaaggatggcgaatacaatataacagcaacagctactgatattgccgggcatacctcagcgacggcaaatctgccttttactattgatacacgtatcagctatttcagcgctgagattgaaacgacgaatgatagcggtattgtcggagataacgttactaacaatactcgcccaacctttacaggtaaaactgagccaaatgctattatcagtgtcataaatagtgagactggcgaagaggttatttttaaagcgaatgacaagggcgaatggacgttcaatttcacttccgactcagtggaagggattaacaatcttacgttcactgttgaagatgtcgctggcaacaaaaaggatttttcctttagttacgttattgatactattgcccctgtacctccgacggtttctttggaggattatgttgttttgccgaatggtataattttatcagggaatgatttaccggctttagtcggtacggcagagccaaagtctaccatcttattgatgcgagatggtaaattatatgacagcattgaggttgactcaaacgggacctggaattatcagtttagtaataaatttcttcagggcgcctatgatattgaaatcatttctcaggatgccgccggcaataaatcctctactgttaaatattcttttactattcaaactgaagttgtacctccaaaagcggaactcgatgccagtgatgattccggtgcaaaaggcgactggattaccaataaacataatgctctgacattactgggaacagcggataggtttgctaccgtaaatatccttattgacggtaaaacgataggcgtgacgactgcggatgcagacggtaactggaattttgatatttccagaaatctgtctgacaatgtttataagattacggttgaatccatcgatcctttaggaagaacgtcatctgtagattatcagcttaccattgatagctttacgccgatccctactgttatgttgcatgatagcgctgactctggcgttaaaggcgatatgattactaaaattaatacaccgttgtttaccgggatggctgaagctaatgctaaggtttccatctatgttgacggtgtgttaagtggtgaggctattgctggcgatgatggtgtatggaattttcaatttaccacagcgttatccgatggctcgcatgacgtaacggtaaaggtagaagatattgccggtaatactgcctcctcatcagcgtataatttccaaatcgtaacgcaaacgcaaaaaccaacaatagagttggtcaacgatacgggggttgataatacagaccatattattaatgaaaagaatcctgcactgacaggaaccgctgcaccctattcaacggttaaactctatattgatggtgcactgatcgctgaggtcagaacaaataaagatggcagatgggagtataccctgaaagccgatcaaggtttggttgatggcgatcatagaataaccgcttcagttgaagatatcgctggcaacattgctcattcggatcctttcttaattagcgtcgatactgctatttcaataccgatagtttcattgagcccggattcagattcgggaatttcagatgataatttaacgaatatcgttaaacctaccttgcacctaaaagatattgatccggacattatcagtgttcaggtatgggatgccatgtctgatacgcagatcggtgttgccacgcaacaacctgatggttcatgggcctatacctttacttcagatttaacggaaggcttgcatcaggtttatgtcaaggttgaggacattgcgggtaataaagcgaacagcgcgatattcgattttactatcgataccacagtatcaacgccggtgatttccctgctttctaaggatgatacgggggttacaggcgataacctgaccaatatcaataagccaggttttgctatttccggtgttgatgccgatgcgcatcgggtcgtcgtacaggtgatgcacaatggcgtgagcgaagagatcgaactttcccacctcaatggtagttggttatttataccagggaatacgtgggcggatggcagctacacgttaacggtgaaagtagaagataaggcaggaaataccaactactcagcgccgctgacggtcgttatcgatacccaaatcgccattgatggggtggaactggtcaacgatagcggcgtgaaaggcgataatatgaccaacgacgaccgtccccactttcgtgtgacggtacctacggatgtcaatgaagtccgtctgagcattgacggtggtaattcgtgggttcaggcaactccgggcgtggcaggaagctgggagtatatctggccgacagacctggcagatggtcaatacacgctaacggtggaagcgactgataaagcaggcaatacagtgacgaagaccatcgatttcgcggtggataccacgctgtcagtgccggtcatcgtactggatagcgcggacgacaccggcatccagggcgataacatgacgaatagcacccagccgacatttgccctgcagcatattgatgatgatgccgttcgcgttacggtcagcgtggagcatggcggcgtcaccaccacatttgacgccacgaaaggcacaggcggatggacctttacgccgccgacatcatgggcggatggtgattataccctgagtgtgtcagtcgaagataaagcggggaacaccagccattctgcatcgctgacggtgacggtggacacgcaaatcgccattaataacattgaactggtcaatgacagcggtattcccgacgataatctgactaataatgtgcgtccgcacttccaggtgacggtaccgacggatgtcaacgtggtgcgcctgagcattgacggcggcaagacgtggttcaacgctacccagagcgcgacgccaggcgtctgggattatatctggccggatgatgtggccgacggaggctataccctgacggtagaagcgaccgatgaggcgggaaataaggcaacacagacgctcgatttcaccatcgataccactctgtctgtgccgaccctctcgctggacagcgcagatgacagcggcatcgcgggcgataatatcaccaatgttaaaacgccgggctttaccctcaacaatattgataccgatgtcagccgggtgatagtggaggtaatgcacaatggcattaaacaggaggtgccactggttcagaccggcggacagtggcgctttgcgccgaccagcgactgggcggacggcgactatatcctgacggtgaaggtagaagatagggccggaaatgtgaagcagtccgcgccgttgacggtgacagtagacacgcatatcgccattgaccgtattgaactggttaacgacagcggtatccccggcgataatctgaccaatgaagcgcgcccgcactttcaggtgacagtaccggcggatgttaacggtgtaagactgagtattgatggcggcaaaacgtggtttgacgccacgcagagcgcgacgtcgggcgtctgggattacacctggctgacgaatgtggctaacggccctcacaccctgatggtggaagcgtccgacaaggcgggaaacaaaacgacgcagaaactggacttcaccatcgataccattctgtcagaaccgacgattaccctggacagcgcggatgatagcgccgctggcgataacatcaccaacgttaagatgccaggctttaccctcggtaatatcgacgccgacgtgaccaaagtggtggtgacggtggcgcatgatggtaagaaccaacagatagagttgattaagaacggcggtgtgtggcgctttacgccgggcgcagcctggaccgatggcgactatacgttgacggtaaaggtagaagataaggcgggtaatacaaattattctgcgccgctgacggtgactatcgatacgcaaacgtctattgatcgcattgagcttcttaatgacacgggtattgtcggggataacctgaccaatgaagcacgtccacagtttcatattacggtaccgacggacgtgaactctgtgcaactgagtcttgatggcggcatcaactgggttaacgcaacgctgacgtctgacggcgtttgggagtatatatggccgacagatctggtcgaaaatacgtataccctgacagtgaaagcaaccgatgttgcaggcaacacggcgacggaaacgctcaattttatcattgataccacattgtcgacaccgaccatcacgctggatagcgcagatgatagcggcaccgccaacgataataagactaacgttaaaacgccgggttttattatcggcggtattgattctgacgtgactcaggtcgtcgtgcaggtgatgcgcgatggtcacagcgaggaggtggagctgacgcagactaacgggcagtggcgttttgtacccggcagcgcgtggactgatggcgactatacgctgacggtaacggtgaaagatgaggcgggtaatattcgccactcagcgccgttgacggtcaccatcgatacgcaaatcaccattgaccatattgaactggtcaatgacagcggtattcccgacgataatctaactaataatgtgcgtccgcacttccaggtgacggtaccgacggatgtcaacgtggtgcgcctgagcattgacggcggtaagacgtggttcaacgctacccagagcgcgacgccgggcgtctgggattatacctggctggctgatgtgggagagggtaagcataccctgacagtggaggcgaccgacaaggcgggaaacaaaacgacgcagcaactggacttcatcatcgataccctactgtcagaaccgactatcgtgctggacagcacggacgacagcggaacaaaaggcgatcacctgaccaacgtaaataagccgacgtttttactgggcaatattgacgcagacgcgcggtatgtcacggttgaggtacagcatggcggcacgaaagaggtgctgacggccaccaaagacgcgaccggcaactggagcgtgacaccgaccggcacatgggcagatggcgactatacgctgacagtgagggtggaagatgaggcggggaacgaaaaacactcagcgtcgctgacggtcactgttgatacccaaatcaccattgatgttattgaactggttaatgataacggtattcccggcgacaatatgactaacgacgcccatccgcagttccgcgtgacggtaccgggggacgttaacgaagtcagtctgagcattgacggtggcgtgacctgggttaaggcgacacagagcgcgacgccgggcgtctggaattatacctggccgggcaccgtgccggatggcgactatacgctgaatgtgaaagcgactgacaatgcgggtaatacggtgacggagacactccacttcactattgatactacgttgtcgacgccggtgatcgtactggatagcgcggacgacagtggtgtccatggcgataacatgaccaatcacacccagccgacatttgccctgcagcatattgatgatgatgccgttcgcgttacggtcagcgtagagcatggcggcgtcaccaccacatttgacgccacgaaagacgcaggcggatggacctttacgccgacaggggcgtgggcggatggtgattataccctgagtgtgtcagtggaagataaagcggggaacaccagccattctgcatcgttgacggtgacggtggacacgcaaatcgccattaataacattgaactggtcaatgacagcggtattcccgacgataatctgactaataacgtgcgtccgcacttccaggtgacggtaccgactgatgtcaacgtggtgcgcctgagcattgacggcggcaagacgtggttcaacgcgacccagagcgcgacgccgggtgtctgggattatacctggctggctgatgtgggagaggggaagcataccctgacagtggaggcgaccgacaaggcgggaaacaaaacgacgcagcaactggacttcatcatcgataccctactgtcagaaccgactatcgtgctggacaacacggacgacagcggaacaaaaggcgataacctgaccaacgtaaataagccgacgtttttactgggcaatattgacgcagacgcgcggtatgtcacggttgaggtgcaacatggcggcacgaaagaagtgctgacggccaccaaaggcgcgaccggcatctggagcgtgacaccgaccggcacatgggcagatggcgactatacgctgacggtgagggtggaggatgatgcggggaacgtaaaatactcagcgccgctgacggtcacggttgacacccaaatcaccatcgatgttattgaactggttaatgataacggtattcccggcgacaacctgaccaatgacgttcgtccacacttccgcgtcacggtgccaggggatgtcaacgaggtacgtctgagtatcgacggcggtaatacgtgggttcgtgcaacacagggcacggcagggatctgggattacacctggccgaaagatgtgaccgacgggctacataccctgacggtagaagcgaccgataaggcgggaaataagacgacgcagacgctcgattttaccattgatacccggctgtcaacgcctaccatcgctatggatagcagggacgatacaggtgccattggcgatcatattacgagcgtcaaaagaccgggctttactattggcaatattgacgccgatgcgcactcggtcattttgcggatcacacagggcggcaatagccaggaagtgacactaacccaggttggaggacagtggcgctttacgccagatgctgactgggcggacggtagctatacgctgacggtagaggtaacggataacgcaggaaacgttcgtcagtccacgccgctggtggtgacggtggacacgcaaaccagcattactgatattacattggtcaatgatcatggcgtgcctgatgacaatctaactaatagcacccgtccgcagtttgagatcacggtgccggcggatgtgaattctgtgcaactgagcattgatgggggcgcaaactgggtgagcgcgacgcagggtatcgaaggcgtctggggctatacctggccaacggatatgggcgatggaaaacacaccctaaccgtcatggtcaccgacagagcgggcaatacggcgacgcaaacgcttgaatttttcatcgacacccggttgtcgacgccgaccattgcgctggatagcacggatgataccggtacgcctggcgatgatatgaccaatcgcacccgaccgacctttattctgcagaatatcgattcggatgttatcaacgttacagtcagcgtcacgcataatggaacgacaacctcgtttactgcgacacagggggctggaggatggagctttacaccgccagcgccgtggggcgacggtgattatacgctgacggtgacagtggaggatcgggcgggaaatacgcgtccgtctacgccgctgacggtgacagtggatacgcaaatagccattgatcgtattgaattagtcaacgatagcggcgtccctggcgataatgtgacaaaacatgtgcgtccgcagttccagatctcggtaccggatgatgtggaaaaggttcttctgagtattgacggcggcacgacctgggttactgcaatcaagagttcgacggctggcatttgggattacacctggccgacggatatgccagagggacagcataccctgaccgtggaagtgactgacggtgcgggtaataagatgacggagacgctcaatttcactatcgatatcacgttgttaacgccaaccattgagctagcgcccgatcaggataccggacagaataagaacgataatctgaccagcgtcactcagccggtatttgtgttggggagtatcgataaagatgttcgacacgtggaattgagtattgagcataacggcacgtttaaaacggtggtactcaccgaatcagccgacggctggcgctatcgaccggattctgctttggcggacggtagctacacattcaccgtgacggtaacagatgtggcaggcaaccagcaaacatccgcgcctttaaaggtgacgatagacggtacgttgactacgccggtgattgaactggcagctggcgaagatagcggtactgttggcgatcgcctcaccaatcacgatcggcctgtgttcgacatacatcaggttgattctgacgttacgcgcgtgatggtcaaagtaacttacaacggtaaaacgcacgaggaagcggcggtattcaccaatggtcaatggcgctttacgccttctgcgagctgggctgatggctcatatcagttagccgttgtggtggaagatctggcggggaatgtaaaagagtctgcgccgtttgaggtgcgtattgataccacgacaaccattaacaatatcgtattgcttaatgataccggcgtgcagaatgatcaattaacgaatgttgccaaaccgtcattcagaattgacgttcccggtgatgtcgtccaggtacgcgtaaccctggatggtggcgctaactggaatgtgatacgcaaaaatgccgacggacagtggatttttgacagcccgaatactctggttgacggcacatatacccttcgcgtagaggccacggatgaggcaggtaatattgcgaataaagatttagtatttaatatcgatactaatatacaggttcctactattgctttagacgcaggacaagataccggagcgaataccgccgataatattactaatatttcacgacccacctttacgattggtaatgttgaccccgatgttatcaaagtcgtggtgacgattgatggtcatgattataacgcgactaaggttggggctggttggcaatttacaccaggcaatgccattccggatggttcttataatattaccgttacggttgaagataaggccggaaataccgcgacatcgaaaccattacctgttgtgatagatacgacggctgaaattgaaagcgtcacgttggttacagatagcggtgatagcgatgtagataacattaccaaagtcgacaagccgcagtttagtattgttaccgctgatgatattacccatgtgcgcgttaaaatcgataacgccgctaattggattgaactcacaaaaggaggggatggccgctggatatttaatgtcggttcggcattacctgatgggcaacacactctcttggttgatgtgactgatatcgccggcaacgttgcgcaagaaacgctgcagtttacgattgatacgactctgcgagagccgacaattgtactcgatcccacccatgatactggtgatgatactaatgataatcttaccaggattaacaaaccggtgtttattatcggtaatgtcgataatgatgtatcacacattgtggttcatattgatggtcgggattacaccattgaaaactcaggggggaatttaacctttacgccggatcaaccgctgtctgacggtcagcatacgatctctgttaccgtaacggatattgctggtaataccaaaacatcggccgaactgcggattgaaatcgacacgcaggttcagattgacagtgttacgttaacaacagatagcggcgtcaacgatcacgataatgtcaccaatgctacccgtccctcttttgaaattgcaacgcctgatgatgtgacatcggtgctggtttctttcgatggcgtaaactggacgcccatcagtaaaaatgcggccgggcagtgggaatttactgcaggtagcgcattgcctgatggtcattatactctccatgtccaggcgacggatcgggcagggaatacggcaaattccacgctgggcttcaccgtggatacgcagattgacggcctgagcgtcgtgatgctggacgacgccggaaaggattctacggatggtattacgaatattacctctccacgttttgaaatttcagccagagaaccgctgcagagcgtgacggtaattttaaacgggaaatccagcacactgactcagggggcaggtaataaatggctgtttacccctgatacaccgttagtggatggaacttacaaaatagaaatagtggctgaagatatcgcaggtaataaaattagcaaagaggtatcattcacaatagacactattgtttctgatcccagtattgatttgctggatgcggatgatactggcgaaagcgctgttgataatattacgagtgtcactacaccacgtttcgttattggcaatgtacccgccgatattgatactgttgtaatcagaattaacggcgtttcttatccggttacggcaaatggcaataacctctgggaatttcaggttcccgttgcgttaaacgatggcgtatatgaagccgttgttgtcttcagagatattgccggaaatacttctgaaactaagctgccctttaccattgataccacgacaagcgtcagtgtcagaatggagccagcgtctgataccggaaattccaatagcgataaccttacgaataagcaaaatcccaaattcgaaggtactgcagagcccaatgcgaaactggtgattaccattgttgacgataagtcaggtcgggaggttttaaaacaaacgattacggttggcgctgatggcaactggagtgtgacgccgaatatactgccggatggcatgtataccatcaacgtcgtcgcaacagatgtcgcgggaaatactgcgcaaacgcaggaaagattcactatcgatacggttacgatcgatcccaccattcgcctttcggatccatctattgatgatcagcatgaagcaaccagcctgcgtcctgagttcaaagggtttgccgaagcgttctcgacgattatgattcagtgggatgggaaagtggtcggctcggcaaacgccaatgcgaatggcgaatggagttggacgccgccatcagtattagcgccaggctcctatgttgtgagcattgttgccaaagataaagcgggtaatgaatcgtcgcaggtcgactttcctgtcgtaatacctgttattgatgtcacgcctccaaccataaagctcagcgaggagagcgatagtggcgccttaggagactttaccacgaataataaaacgccgaccctgattgggagcacgttacctaatacgattgtgagtatttatgtggatggcgtgaaggtcggcgaggcgacagcggatacagcgggtcgatatactttccagttatcggaaatgaaagatggccattatgtcgtccaggtgggtatcgtcaaccctcgcgataatagcgaactgcgttctaccgccgttgatgtcactatcgataccgaggttgctgaactggtatggaatatatctggaatgcatgagggcggatatatcaatacggtgacgccggagattggcggcaccagtgagccaaacagcaaaatcactatctttgtgaatggcgttgaaaaagcgattgcttatacgacaggcgcaggacactggggcgtagtattacccgctttgggtaatgacggtaattatgaattaacgtttaaagttgaagacgttgccggtaatatcagagagtttggtccgcagaatgtaatactggatacagtaatttcgccgttaaccgtggtattacgcgaagctgatgacagtggcaaagttggcgactggatcaccaataaatctcatgtcaccatcgatggtactgccgaagccggaagtactttaaccatcaggaatccgcagggagtggttattgctaccctggtggtaggcaatgatggtcgatggagcgcagaattagatctgcgtgaaggtagtaatgcctttgtcgtggtatcggaagataaagcgggcaacagtcaacaaaaagagattctgatagaacatgatacgcagattgaaatcagcgatatttcattaagtcgggatactaatagcggtgataaatatgatctgattaccaataataagtctccggtactggttgccatgaccgatcccggcgcgacggtacaggtttatattaatggtgtgttacaaggcacagtagaggcgagttcgtcaggtaatattagctataccatgccggcaaatagcgccgacggcgagtatcaggtgcaatttgttgctacggatactgctggtaaccgggttgagtctgcgattacaaccgtgacaatcgattctcaaattgctgtctttgatattgatgaagattcattaccggccctctctaataaccgagcgttgtcagtctcaggtgtcggggaggctggttctcaggtcagcatctttgtcgatggtaaattagtcaacgttgttatggttgaggctgatggcacatggcgcgcgccgatactgctgcaagatgatggtacgtttaatattcatttcagcattactgacgttgctggcaacactgaagtgagcaaggattatagcgtggatgtcgattcatcaaccgacttcccaacgctcaaccttgaagatgcaagcaactctggttcacttgacgatctgattactaatcacaacaagcctgtattagttggcaccgcagaagcgggagccacaatccatatttatgtggatgaaaagatcgtggcaaatgttcttgtgcttgaagatggaacctggtcctatcagtttgataatgcgttaaaagatggtgaatattctatccgtgtggttgccgaagacccggcaggtaatacggcagaatcgcctcgcttactcgtcacgatagataccagtacgtttatcgataatcctgctatggtggcaggttctgataatggtattttcagtaatgatagtataacgagtcagacccggcctacgtttagtatttttggagaaatgaaccagagtgttcagattttcattgatggagtgctagtcgatacgatcacggtgaccgacagaaatcaagtttatcgacctgagtcaccgttgggcgatggttcccatagcatttattatgttatcaccgataaagcaggcaacacggctacctcgaaaacgctaaactttactatcgatacctttaatacgacgcctgtcgccattgattctatcggtggacaaacgttagcagagatgaccggtagtgatggcaaaatatatataacggacacgacgcgtaacttattgtttagtggcagtgccgagcccaatagcaaaatagaaatcatcattaatggcttaaatgtgggggaagtttgggttaatgaaaaaggccactggcagatgccggtgaacccgctttatttcacagaaggccaactggatatcactgttaaatctacggaccgtgctggtaacgtaaatcaggaaaagtattccatttgggttgatacgcatatcaaggtatttaccagcgagcttgatgacaataaatcatcatcgaaaacggaatggtggagtaatagcgatctcattaccatgcgaggcacgggtgaaattggcgctacggtatcattaatcgtggctggcgtcacgctggcaactgctgttgtggcggcaacaggacgatgggaattatcaacagacaagcttccagaagggacttacgatattagtttggtcattgaagatagcgccggaaatcgttgggaagatgtgcgtgaaatatttattgaccgaacgccgccaaatgctccggtcgtaacgtattcagatattgtcaacgatctaattattatgcaggggacggcggaagccaaatctcagctaataataaccgatagtgaggggaatacttatacgttaaccgttcctgataatggtaaatggagtatggctatcccgtatccatcagaagggaagtttaccattacgagtgtggatgctattggtaaccggagtgatgatgtccctctcgatatcatgaaagaggttcccgttatttcattatctccagactcagacagtggtacggtgggcgataatattacgcgagataagcaacctacctttattatcgggaatctggaaagcgatgttgtggtcgttcaggtcgatatcaatgggaccgtatataatgctgaaaaaaatgccgatggcgtttggttctttacgccaggtacaccgttagctgatggttcctatacgatatcggtaatcgcaagcgatgccgcgggtaatcagaaaaactcgttacccattactgtcacgatcgacagcacgctgacggtgccggagattgcgttggcagcaggtgaagacaatggcgcttcagacagcgataacgtgacgaatcacacccagcctaagttcacgctgcagcatattgatgctgatgtgaccggggtgaccgtaaacgtgacgcataatggcgtgacagacatctatcaggcgacgcaaggcgcggatggctggaccttcacgccgccagccgcctggaatgacggtaactacacgctgagcgtgacggtggtggatcgcgcggggaattcacagcaatctgcttcgctagcggtgacggttgactcaacggtgacggtaacagcggatagccagcatgacgatgcgagcgatgacgccacggcaacagcggttactccaccggagtctgaaacagtgaatgccgaaagcgctacgcatcttcgtacagagccgtctgcggcggaagaaagcgtggtgaaggtgacagcctatagtattacattgttaaacgctgactctggggatgaaatagatcgttcaattagtcagacaccttcttttgaaatatcagtacctgagaatattgttaatgtcagtattatgtttgaaggagaagagtttactctgccgataactaaccagaaagcaatattcgaagttccgctatctttggaagatggtgaatatactatggacgtgaaattcattgataaagacaatgatttcctgattaaggagaaaacattctcagtcgatcactcctcggcggatattgtgaacgcaatgaatgtaagaggaaagaccgaggatgatattaatgattccccttccacgagttctgtagggcacaacaataacggcgctattgatgttttcgccgttaatgaagttacgctacctgtagataatcaagaagaacacgcataataacggaggcccctcacctttgggtgagggggtttacttatggataaaaaactagaaccttattatttaagtgcggaaacggcattatctatagtgtctaaaaaattcaacataaaaattgacatcaaagaggatgatataaatttaagatttaaaaagtacgacagaaataacactgacgactctatacaaatgaagaatttctttttgtcgttagggctttctctacaggatatattatttaataatggtgaggatttactaaatgagcctatgccgattttactattaacaccagaaatgaagtggatggtgtgtgtgagtggcgggcaaaaaataaagttggtaaacgcgcgcggtgaactctgttatgttgaaattgaagatgaatatttaaaagagttatctgcatttagtatactacctttaaataaagttgttgatagtataagagtaaaaaatatcataaaaaactctttatcgatgaacaagattttttatactaaatactttttttcatctctttttatggcaatttttgcgttaactatcccagtatttagtaatctgttctatgataagcttgttccaagcgcttcggtttcatctttatttggcgtggctataattgttgctgtatttattgtttttgagtttatccttcgtacttcgaaagatatttatcagtctatcacagcaaggcaggatgacgtcgatattgatatcgcatttcttgaagcggtactttatagtaaaaagaaaaatggcagatccatgtcatcagcatttgtgctatggaatgagtttcagaaaattaaacccgttttattaaactcgatctttcaacgtatagccgatattccaatatttattatatttctcattgttatatatgtaaatttaggtctggttgttattgtacctattaccatgtttatcgtctctattattatttccctcgttaaccaccattatactaatgagttaatgaacaaacaaaaagaaggacagaagaacaggaatatttttatctcagaagttttcttatctattaaaatgatccataccttaaataatcaaggtttactttttgattgggttaatacatcaaatgaacagtcgtatcttaacctgaagataaggaaattaaatcttatctatcaatctatattggggagtatgtcatctattacccaaataactattatggtaatagccttttttatggtaatcaagggtgatgttactactggcgcaattgtttcatctgtcattgtctctggccgtatttccgggatcatttcgaatttttcttctacattaatctctattttatcagcagaaaaaaccggtaaggatctgctttctttttttgatgaagatcaggcagaaaaaacaccggcattacagtcaatatcaaagtgcaatggcgatatctctatccggggcgtgagttatcagtatgatgctcaatctccgatgattattaaccgactgtctatagacatacctgcggggcaacgtgtcgcggtggtaggcgaatgcggagcaggaaaaagctcattactgggaatgctatctggctacctttcgccaacagacggtgccattttatatgatggatataacttaggacatttatcgcagaactttttttctcagcatttaagcgtggtgacgacacatgatgttttattcaccggaaccattgaaagtaatttcgcgttaaaaccgcaaaacgacaggggccgggtactcaaggcgcttcagctggcgaactgtggttttatcttgcaacatcctatggggctgaagtttccggtgaattttatggctaaaaacctgtcatccggacagcagcagcagttattattagcacgtagtctgagtagtgacgccagcgtctttttatgggatgaaccaacatcaaatctggatgagaataccgagaagcaaatttttgataacttagatgagtttattcatgggaaaacgttgatcatggtgacgcatcgtcgatatctgataaagtattttgaccgggtcctggtaatgaaaggtggaaaaataatccgtgattgttctccggataaattattaatgtaaaataagcagcgcttgtcgctgttatcaggtggtactgcttaataaaaaagacccgttgcacaaacgggtcttttttgtcatttaacgagtcggcaacgtcttcaataagtttagctcgattctgttagggctattccacttgccatttttggataaccacacctggcggccctcatcaacggcaatgcgagggacgtgatggtgcgcaaggctacccctggcgcgcgattccgcgttgagataaccggtgggcggcttcagcggcagcgatagcgtatcaggtcagcaccatcggccattctggcggggtctggctcatcgtttcgaccattacggcttcaatgttatgccagatcgcagcgagatccatcatggtaataccgagtaaaccggtggcaaaccagcaggcggataccacgcccagaccgctactgatcaccgccagaccaatataatctgatttacggaaacggatattgagcgtgctggctaaaaacatgagcacggcgctcagcagttgccagcggagaagaacgacaccagtggttatggcagccatgaaacatttcctctgaatagacctttgtccaggacagcacggcgttgttcccgggaaacgtgggacattctggctatcaacggacatcacatcaacatcgaatgaaacattgtttctatttcattgtttttgtgaactatatcacaaaaaccagcttgttcgccagatcggcaatgtattttttgtgcgttttataaccgtattttttgtgtgacttctacgcgtccgtagagaaactgccggaaagcaaagatgtattattactactcttttattttttttcgtgaaattcagacctgataaaaatatcaagttatttatcaaaagaaaggagtaaagatgtataccccatcgtttacttgagtataaatctgatattatcaaaaatatttagtgtcctgcctggtatgcgaaagagattgcgcgtagttattaatggtaaatgttgatcggtaaaagtctgttgctaatattgataaattcatgcaccgtaaacctccatttggttcacgtcttattttgccaacaatagtcacaaataatgcagggaaataggctgaaaatgagtcaaagcacacgacgcaaggtgttgagatttctcggaacgatcattgtggtgttacttcctatattgctggcgatctggtttgctcatatccgggcagtctctgaaaccagaaatcagttacattcatttgcgcagttggtattagataaaacggagcgggttatcctgcaagcagatttagcccgcgatgccgctgaacaatatcaggggcaagcctgtacgccagcccatcaacagcgaatgctgaatattatccgcggtcgtttgtacattaatgagttgatttatgctaagggccagcgttttctatgctctacggttatgacgccaacaagtccttattttattccccgcgctgactataaacgaaagcctgacatcgctatttattactatcgtgatacgccttttttcaacggttataaaatgacatatatgcagcggggaaactatgtcgcggttatcaatcccttatcttatagcgaggtgatgtcagacgatccggcgttggcctggggaatgtatgatacggtgaccaacacctttttctccctgagtgaacaggcgcaggctgatcagctattacctttggtacgacggagtgaacctgtgttccaacagggtgagcgtttttatactctggttaaatcagcaaaacgaccggttgccgcgattgtgtcaacctcaaagcaacgcttttaccagaacctctttcatcagcttacgttaacgctaccgttagggatcatctgtagcattatcatcttatttatgtggtcacgatcccggcaggcatattactcaccgcgtcgattgctgcaacgggccattaccaggcaccagctttgccttcattatcagccgatcattgatatccgaaacgggacatgtgtaggtgccgaagcgctattgcgttggccgggctatcacggtccggtgatgagcccgtgcgaatttattccgctggcggaaaaagaggggatgattgagcagatcaccgattatgtcgtcgaagaggtatttaatgatttaggtggttttctggccgcgcacccgcatctttatgtctctatcaatctcgctgccgccgattttctctcttcccgactaattgtgatgattcatgaaaaaacgcgtcagcattcagtgcttgcgcaacagataaaggttgaagtgactgagcgcggatttattgatgtgcctaaaatgacgccgattattcaggcgtttcgccaggcgggatacgaggtggcaattgatgactttggtaccggctattcgaacttgcataacctgtactcattaaatatcgaccttttaaaaattgataaatcttttgtcgacacgctaaccactaatagcgccagccatttgattgtggaacatattattgaaatggcgcaaagtttgcggctaaaaatcattgctgagggggttgaaacggctgaacaggttagctggttgctaaaacgcggcgttcagtattgtcagggatggcactttgcgaaggcgttaccaccgcaggaattcatcgcctggctacaacaaacgcccgcgcctctgacgatacgcgggcagacgccctacaggcggtgacggtaatcgctgggagtgcgatcgaactcgcggcggaatacacgcgagaaggtttgctgcgatacatagcccaggtccatcgcgatatcaaaaatcgggcgctcggtcgttcgtagctcaacggccgccaacaggagacggcgctggcgaatatactcgcctaatgtttgatgcgttaccgtacgaaacatccgctgcaaataccacttggagtagcccgatttttttgccaccacatcaatgtttagcggttggtcgatatgttcatcaatccattcgataagggtctgaattatctgctgatgcgacatattgttgcctcttaaacagtattcgattcgtcgttttgtctgcgggcgagtataattcctcaagttaacttgaggtaaagcgatttatggaaaaaaaatctccccgtttaaaagccttactgacgccgggggaagttgcgaaacgtagcggtgttgctgtgtccgccctgcacttctatgaaagcaaagggctaattaccagtatccgtaatagcggtaaccaacggcgatacaagcgtgacgtgttgcgttatgtcgcgattatcaagatcgcccagcgtatcggcatcccgctggcaactatcggcgacgcgtttggtatcttgccggaaggacatacgttaagcgcgaaagagtggaagcagctctcatcgcagtggcgcgaagagttagaccgacgtattcatacgctggtggcgttgcgcgatgagctggacggttgtatcggctgcggctgtttatcgcgtagcgactgtccgctgcgaaatccaggcgacaggcttggcgaacacgggacgggcgcccggctgcttgaagatgattaacatgcactcggccatcgggctgagctcacctaaaactaaagcgccgctaagggcgctttagtttgtttccggtctttgtctttcgctctatcccgctgattacaggagggtttcccccgacgtcaacacccctcatatcgagcacgtggtggaggttccggtttgtgttgatactgtaagtgtaagcgacgacgccctgttcgccagcgaaatgctgattttttagccgaaatttttacggcaactgccataattttctatagttagttggcataccttacaggagacagccatgctgacggtgcaccatttaaatcagtctcgttcgcagcgcatcttgtgggcgctggaagagctggcgttgccttaccagattgtgcgttaccagcgtgaaaagaccatgctggcgccgccggcattgaaaaaagtgcatccgctgggcaagtctccggttatcgaagatcacggtatggttattgcggaatcgggcgccatcctggaatatttgcaggacacttacgacagtatcggacgctttaaacctgcggatgcgcaggggaaacaacactatcgcttctggctacattacgctgaaggttctctcatgcccttgctattgatgagactgctctttacctctctgggtaaaccgccggtaccattgggcctgcgaacgttgggcggcgttatcggtaagggcgcgcaaaaagcgtacctcaatccgcaactggaaacccatgcgcgctttattgacgggcatctggcaaatcacccctggtttgccggagagcagttaagtatggcggatatccagatgagcttcccgctatttgcgctgcttgcccgaggcggaatcgctcatctcgaccatatcaacgcatggaaagcgcgggtagaaatgcgtccagcctggcagcgagcgattcagcagggcggtccgtttaccattcccggcggataatggcgtttttgtgagcagattgcgcaacgtatttgctaacagcgatgcgaaaaattgttgctggattgcgcagggacgataacgtttgcgcatcgtctggcgatttattgagcatactaagcagaaaagcataaaaagcggcaaagttcagttgaaaaagcgttgatgatcgctggataatcgtttgcttttttttgccacccgttttgtatacgtggagctaaacgtttgcttttttgcggcgccccggttgtcgtaaatgtagcacaaggagataacgttgcgctgttagtggattacctcccacgtataccgacgaataataaattctcaggggatgttttctatgtctacgccttcagcgcgtaccggcggttcactcgacgcctggtttaaaatttcacaacgcgggagcaccgttcgccaggaagtcgttgctggcttaaccacgtttctcgcgatggtttactccgtcatcgtggtgccagggatgctgggtaaagccgggttcccgcctgctgccgtctttgtagcgacctgcctggtcgcaggcgtcggctctattgttatggggctttgggcgaatctgccgctggctatcggttgcgctatctcgttgacggcgtttaccgcgtttagcttggtcctggggcagcatattagcgtcccggtcgcgcttggcgccgtattcctgatgggcgtactgtttaccgttatctccgccaccggcattcgtagctggattttgcgtaacttgccgcagggcgtggcccacggaaccggtatcggtattggcctgtttttgttgctgattgccgccaacggcgtcggcctggtcattaaaaacccgctggatggcctgccggtcgcgctgggcgatttcgataccttcccggtgattatgtcgcttgtgggtctggctgttattctcggtctggaaaagctgaaagtccccggcggcattctgttgaccattattggcatttctattgtgggtttgctcttcgatcctaacgtccatttttccggcattttcgccatgccttcgttgagcgatgaaaacggcaactcgctgatcggcagcctggatattatgggcgcgttaaaccctgtcgttctgccaagcgtactggcgctggtgatgacggcggtgtttgatgcgaccggcacgattcgtgcggtcgcagggcaggctaatctgctggacaaagacggacaaattatcgatggcggcaaagcgctaaccaccgactcactgagtagcgttttctccggcctggtcggggcggcgccagccgcggtgtatatcgagtctgcggccggtacggcggcgggcggtaaaacgggcctgacggcgattaccgtgggcgtgctgtttttgctgatcctgtttctttcgccgctctcttatctcgttcccgtctatgcaactgccccggcgctcatgtatgtcggtctgctgatgctgagtaacgtggcgaaaatcgattttgctgatttcgtcgatgcgatggcggggctggtaacggccgtatttattgtactgacctgtaacatcgtcaccgggattatgatcggctttgccacgctggtcgtcgggcgtctggtttccggcgaatggcgtaaactgaatatcgggactgtcgtcattgcggtcgcgctggtcgctttttatgccggcggctgggctatctagctctgccttcattctgaaaaacgggcggcgttggccgcccgttttcattttcaggacacatcacgttaccttttgcgttaatctgaagaaggtgaaaccgaggcatgatgcctctctccatcataaaaaacatcgcaaacagggaacgcatggaaattttcttcacaatactcatcatgacccttgtggtctcgctgtcgggggtatttacgcgtgtattacccttccagcttcctttaccccttatgcagatcgccgttggcgcgctgttggcgtggccgacgtttggtttgcatgtggaattcgacccggaactcttcctggtgctgtttattccgccgctgctgtttgcggatggctggaaaacgccgacccgtgaatttcttgagcatggacgagagattttcgggctggcgctggcgctggtcctggtaacggtcgttggaatcggcttcctgatttattggctggtgcccggcattccgctgatccccgcctttgcactggccgccgtgctgtcgccgaccgatgcggtagcgctctccggaattgtgggcgaggggcgtatcccgaaaaaaatcatgggcattctgcagggagaggcgttaatgaacgacgcctccggtctggtatcgctgaaattcgccgtcgcggtggcgatggggacgatggtctttaccgtcggcggcgcgacgctggaattttttaaggtcgctatcggcggtattctggcgggttttgtagtcagttggctgtatggccgctcgctgcgttttttgagccgctggggtggcgatgaacccgcgactcaaatcgtcctgctgtttctgctgcccttcgcgtcttacctgattgccgaacatattggcgtctcaggcatcctggccgcggttgccgccgggatgaccatcacccgttctggcgtaatgcgccgcgcgccgctggcaatgcgtttgcgcgcgaacagtacctgggcgatgctggaatttgtctttaacggtatggtctttctgctgttgggactgcaattgccagggattctggaatcttcgctggcggcggcggaagctgacccgaatgtcgaaacctggatgctctttaccgatatcgtgctgatttatgcggcattgatgctggttcgcttcggctggctgtggaccatgaaaaagttcagcctgcgctttttgaagaagaaaccgatggagttcgccagctggacgtcgcgtgaaattctgattgcttccttcgctggcgttcgtggggcgatcaccctggctggtgtgctctctataccgttacttttgccggatggcagcggatttccggcgcgttatgaactggtattcctggcggctggcgtcattctgttctcgttatttgtcggcgtgatcatgctgccgctgctgttgcaacatctggaagtcgccgatcatgcgcaacagttgaaagaggagcgtatcgcccgcgcggcgacggcggaagtggcgattgtcgccattcagaaaatggaagagcgtctggcggcggataccgaagaaaacatcgataatcagttgcttactgaagtaagctcacgtgtcattggtaacttgcgtcgccgtgccgatgggcgaaacgatgtcgaaagctccatacaggaagaaaacctggagcgacgtttccgtctggcggcgctgcgttccgagcgcgccgagttgtatcatctgcgcgccacgcgagaaatcagcaatgaaacattgcaaaagctgctgcacgacctggatttgatggaagcgctactgatagaaaatcagtagtccttgtggcccggtggcgccatgctttccgggcctacaagtaggccggataaggtgcttgcgccgccatccggcaagggtcttaacccatggcttacggttgtttcagccaaaacccttcgcaacaggttaaccatgcccgggcgctgtgcgacagatacacgccctctcgccaaatcatgcccaactgccagcggagatcgctttccagcggtagccagcgcagcgtggccttatccagacgctgacaaatcggctccggcaaaatggcgatgccgacgcccgcttgcaccatggcggcgagaaaatcccattgcccgctgcgcacggcaatccgtggttttacgtcatgctggctaaataaggtcatcaactggcggctcagggcaaagtcttcgttatagataagaagaggatgctccgccagagcttcaggcgcgatggagtcgccggttgtccactgaccggaacggggaaccagcacgcacagcggatggctgaacagcgataacgtcgtcagcccgctcgcttcttccaccgggagcgcggtcatcgcaacatccagctcgccattcattaccgcctgctgtaccgtcaggccgccaaactccgaaattttgagttcaacgccagggtagcgttgtcgaaacaaactgattggcccggccatcaacatgccgaccatcgggggaatacccagccgcagcacgcccttattgagatggttaatatcgctcaactcggcctctaactggcgaaactcagcgaggatcgccagaccgcgttcaaacaccacgcgtccggtatcggtcagcaataacttacgtccgtcgcggatcagtagcgtacagttaagctcatcttcaagatttttcagcattttgctaatggtgggctgggtgacaaataacttctccgctgcgcgggtgaaactttgctggcgcaccacctcgacaaaataacgcagcgttctgatatccatgattattccttccgactatgcctgcaatgattttaattcatttctgcccgtgacggaggttctctatactggcgctccgtattatttttcaggacattccctcatggctgtggcgataagccgcgttacgcctgccgttgtgcaacgactccaggtaccggttcaggtactgctctatgcaggtttattcattttttcccaatatcttgtctcctggctgcacctgccgttgcccgcgaatctggtcggcatggtgcttatgttggcgctgatcgtttgccggattattccgcttagctgggtacgcgcaggcgcacgctggctgctggcggagatgctgttattctttgttcccgccgtcgtggcggtagtgaactatgcccatctgttactggtggacggctggcgcattttctcggtgatagcgatcagtaccttaatggtactcggcgcgacggcgtgggtggtggataaagtgtatcgctatgagatgagcaggctaaaccgtgaataacgttcagttaagcgtactgtgcctggtgattacgctgggaatttatttcgccaataagcgcctgtatcgccgttttcgcaaattgccgttgatgccattagtgctgacgccggcactgctggtgttaatgctggtgttcggtcatatctcctggcaaaactacattggtgaatcgcactggctattgtggctgctcggcccggcgaccattgcctttgcggtgccggtgtacgataacctcgcgattatcaaacgtcactggatgtcgctcaccgcgggcgtagtgacggcgacggtggtggcagtcaccagttccgtttggctggcgcgtctgttcacgttatcggatgagattcagcgtagtctggcggtacgttccgttaccacgccgtttgcgctggcggcggcagaacccctgggcgggcagccagatctggtggcgctgttcgtggtcgtcactggcgtgtttggcatggcggtcggcgacgcgctatttttgcgtctctctatccgggaaggcatggcaaaaggggcaggattcggcgcggcgtcacatggggcgggcacggcgcgttcctatgaacttggtcagcaggagggcgtcgtcgccagtctggtaatgatgctgtccggcgtggtgatggtgctggcagccccgctggtggcgagggtgatgttctgattttcctccgacccacagggccggaggaaacggtaagattaatgcgcacgcccttgttgtacgccgaatcccgtttgggagcggataaactgagcgcggaactgctcacgttcacggttgccttctgccgagttatcggtggccgagaagaaccagatccccaggaacgccacgctgatagagaacagcgccggatactcatacgggaagatcgctttttcgtggccgaggatctgcacccaaatggtagggccaagaatcatcagcaccaccgctgtcagtaaacctaaccagccgcccagcatagcgccgcgcgtggtcagttttgaccagtacatggaaagcagaatgatggggaagttgcagctcgcggcgatagcaaatgccaggcccaccataaaggcgatgttctgattttcaaacaggacgccgaggataatggcgatcacgcccagcaccaggacggtgattttcgacaccttcagctcttcacgttcggttgcgcctttgcggaacacgttggcgtacaagtcatgcgacaccgccgatgcgcccgccagcgtcagacctgcgaccaccgccagaatggtggcaaacgccactgccgaaataaagccgaggaacaggttgccgcctaccgcgttggccagatgcaccgccgccatgttattgccgccaatcagcgcgcctgcggcatctttataggcgggattcgcccccaccagcatgatagcgccgaagccgataataaaggtcagaatgtagaaatagcccataaaaccggtggcgtagaacacgctcttgcgcgcttcgcgggcatcgctgaccgtaaagaaacgcatcagaatatgcggcaagccggcggtgccgaacatcagtcccagacccaacgacaatgccgaaatcggatcttgcaccaatcctcctgggctcataatcgccgtgcctttcgggtgtaccgccatggcttcggtaaacagattattgaagctaaagccgacgtgtttcatcaccataaaggccataaaactggcgccaaacagcaacaggacggctttgataatttgcacccacgttgtcgccagcatcccgccgaacagcacgtacatcatcatcagcacgccgaccagcaccacagcgatgtgatagttgaggccgaacagcagttcaatcagtttaccggcgccgaccatttgggcgatgagataaagcgccaccactaccagggagccacaggccgaaagaatacggattggcccctgtttcaggcgataagaggcaacgtcagcaaaagtataacgtcccagattacgcaggcgctcggcaatcaaaaacaggatgattggccagccgacaaggaagcccagcgaatagatcagcccgtcataaccggaggtaaacaccagcgcggaaatgccgagaaatgacgcggcagacatatagtcgccggcaatcgccaggccgttctggaacccggtgatattgccgccagcggtgtagtagtcgctacgggaacgtacgcgtttagaggcccagtaggtaataccgagcgtaaacacgacgaaaatcaaaaacatgataatcgcctgccagttggtgggctggcgttcaaccgcgccgctaatggcatccgccgcatgagcggcgaaggggagtgcggcggcaagcgccgtcagaactctcttcataatactttcacctcatgcagtacggcgttattaagacgatcgaattcgccgttcgcccgccagatataaattccggtcaacacaaaagaaatcacaatcaccccgacgccaatgggaattcctcgggtgacgctggttcccgcatgtagaggcgtgcccagccagccaggcgcgaaggcgatcagtaaaataaagctgatataaaccgccagcatgataaccgacagaatcgtggcaaaccgttgccgtttttcaactaattccctgaaacgcgcactgtcttctatccgctgataaatttggtcattcatcacagagctctccagaggtccccctgcgtctttcgcgctacaggcgcgttggccgcactcgcgcgccccagccacatagtgaacttgaactatgctgctgagggtgtgctcgcttgccgccttcctgtaacacgaaatcctttgggggagggttttttatatttccctctcccggtttgagagagggcaggggtagggtcgtaggccggataaaacgcgttcgcgttgccatccggcatttatggttatgacggcatcgcgatggcctgcttctcttcgagcagtttctccaccacgccaggatcggcgagagtcgaggtatcgcccagattgctggtatcgcccgccgcgattttgcgcaaaatgcggcgcataattttgccggaacgggtttttggcagtgagtcggtccagtgcagcacgtccggcgtcgccagtgggccaatctctttacgtacccagttgcgcacctccgcgtacagttctggcgacggctcctcgccgtggttgagcgtcacataagcgtaaatcgcctggcctttgatagcgtgtggaatacccaccaccgccgcttcggcgatcttcggatgcgccaccagcgctgactcgatttccgccgtacccagacggtggccggagacgtttaacacgtcgtccacgcgaccggtgatccagtaatagccgtcctcatcgcgacgcgcgccgtcgccgctgaaatacatattcttaaaggtagagaaataggtctgctcaaaacgttcatgatcgccgaacagagtgcgcgcctggcccggccaggaatcggtgatgaccagattgccttccgtcgcgccttcttgcggatggccttcgttatccaccagcgcaggctgtacgccaaagaaaggacgggtggcggaaccggctttcagttcgatagcgcctggtagcggcgtgatcataaaaccgcctgtttcagtctgccaccaggtgtcgacgaccggacatttttccttgccgatcttcttccagtaccattcccacgcttcgggattgatcggctcgccgacggaacccagaatgcgcagtgaagaacggtcggtgccttcaatggctttatcgccttccgccatcagcgcgcggatggccgtcggggcggtatagagaatgttgacctggtgtttgtcgaccacctggcacatgcgagcgggcgttggccaattcggcacgccttcaaacattaaggtggtcgcgccgcaggccagcgggccatacaacagatagctgtgccccgtcacccaacccacatcggcggtacaccagtaaatatcgccagggtgataatcaaagacatacttaaaggtggtcgcggcgtagaccagatagccgccggtggtgtgcagcacgcctttcggcttgccggtggagccggaggtataaaggataaacagcggatcttcggcattcatcgcttcaggctggtgctcagggctggctttttcaatcaaatcgcgccaccacaggtcgcggccttcttgccagtcaatgtcgctgccggtgcgcttcaggacgatcacatgctcaacgctagtgacattcgggtttttcagcgcgtcatcgacattctttttcagcgggatactgcgtccggcacgtacaccttcgtcagcggtgatcaccagccgcgagctggagtcgataatgcgtccggcgacggcttccggcgagaagcccccgaagatcaccgaatgcaccgcaccgatgcgggcgcaggccaacattgccaccgccgcttccggcaccatcggcatataaatcgctaccacatcgccttttttaatgcccagatccagcagcgtattcgcgaaacggcagacatcgcgatgcagttcgcgataagagatatgtttactctgcgacgtgtcatcgccttcccagataatggcggtgcgatcgccattttcctgcaaatggcggtcaagacagttcgccgccagattcagcgtgccgtcctcgtaccatttaatcgacacattgcctggcgcaaaggaggtgtttttcactttttggtacggcgtgatccaatcgagaatttttccctgttcgccccaaaacgtatcggggtcgttaatagactgtttatatttagtctcatactgctctggatttatcaggcaacgatccgcaatgttggcgggaatggcgtgtttatgtgtttggctcatgctgttgttctccttgtaggatgttaataatatgtcgcataaacgttaaatgtagggtcttaataagttttgtttagtatttgggcgacagatcacgcaaaaagggaactgtgcaaataagcagcaatctattttttgattgtgtcccgcaaaattagataaattttcgggataacatgacgttatatgaaattttttaaaaaagtgatccgtgtccggaaatcagaaaagagagggagttttgtccaggttactaactctaaagtggtattttacatacacttacaattgattaaagacaacattttaagtgtggttatttgttacacatagaggagatcaatgtaataacagtatttgtgcggttgctgttatggaaaacgataaaaaatcgccattaaagataatggcgcaatctggatgagacctctatggcaaggaaaacactacgcgcacgccgtttcttcagccttatatttccttttttcttcattacctctgtttacgctgagcaaacgcctgaatccgcaaaaaccgttactgttgaagcgaaaaatgaaatgttcgcgcctcaacaccccgaccaatatcagtcatggaaagcgacgtcagaacagtctgcccgtgaagatgcgctggcggaagaccctcgtctggtgatcctgtgggcgggctatcccttctcccgtgattacaacaaaccacgcggccacgcgtatgcggtaactgacgtgcgcgaaacgctgcgtaccggcgcgccaaaaacggcggaagacggcccgctgccgatggcctgctggagttgtaaaagccccgatgtcgcgcgccttatccaacaagaaggcgaagacggctacttccatggcaaatgggcgcgcggcggcccggaaattgtcaacgatttgggctgtgccgactgtcataacaccgcgtcggacgatttcgcccaggggaagccagcgttaacgttgtcgcgcccctatgccgaacgggcgatggaggctatcggcaaaccgtttgataaagcgggacgatttgatcagcaatcgatggtctgcggtcagtgccacgtggagtactactttgacggtaaaaacaaagccgttaagttcccgtgggatgagggcatgaaggtcgaaaatatggagcaatactacgacactatcgccttctctgactggactaactctctgtcgaaaaccccgatgctcaaagcgcagcacccggaatatgaaacctggagcgcgggcattcacggtaagaacaacgtgacctgtatcgactgccacatgccgaaagtacagaacgccgaaggcaagctctacaccgaccataaaatcggcaacccgttcgacaatttcgcgcaaacctgcgccaactgccacacccaggacaaagcgtccctgcaaaaagtggtcgccgagcgtaaacaggcgattcatgacctgaaaatcaaggttgaagatcagctggtacatgcgcacttcgaagcgaaagccgcatgggatgcgggggcgacagacgcggaaatgaaaccgattctgaacgatattcgccacgcgcagtggcgttgggatctggcgattgcgtcacacggtattcatatgcatgccccggaagaaggtctacggatgttaggcagtgcgatggataaagccgcggatgcccgtactaaactggcgcgactgctggcgaccaaaggcattacccatgaaattccgctgccggatatttcgacgaaagagaaggcgcagaaagcgattggtttgaatatgcaacaaatcaacgcggagaagcaggacttcctgaaaacggtcgtaccgcagtgggaagatcaggcgcgtaaaaacggtctgttaagccaataacctcacatgtgacaaatttgccggatgacagcgcaagcgctttatccggcctacagaagtcttgtaggccttaaagctgcgcgccatcaggcattatgtaatggagtgaatatgagcgtattacgttcgttattaactgctggggtgctggcgtcaggcctgttctggagcctgagtggaattactgccacgccaacgccgcaggagtcggatcaacgctggacggtcacccagcagcgtaatccggatgctgcctgtctggactgtcacaagccggacaccgaaggtatgcacggtaaacatacgggcgctatcaacccgaacaataaattgccgataacctgtaccaactgccacggtcaaccgtcgcttcaccaccgtgaaggggtgaaagatgtgatgcgttttaacgacccgatgtatacggtagagcagcagaacagcgtctgtatgtcctgccacttgcctgaacaactgcaaaaagcgttctggccgcacgatgttcatgttactaaagtgacctgcgccagttgccattccctgcatccgcagcaagacacgatgcagacgctaagcgagaaagggcggatcaaaatatgcgtggattgccacagcgatcagcgtactaacccgcactttaatccggcgtccgttccgttgcttaaggagcagccatgagttgcacccgacgtcaatttattacccgcgtcggcgcgctggcggcggtcagtgggatggcaggacgcgttgtagcgaacacgttgaatattaatggcgtgcgttatggcatggtacacgatgagtcattatgcatcggctgcacggcctgcatggatgcctgtcgggaagtcaacaccgtgccggaaggcgtatcgcgcctgacgattattcgcagcgagccgcaggggacgtttcctgatgtgaagtatcgcttcttccgccactcgtgccagcattgcgaccatgccccctgcgttgacgtctgcccgacgggggcatcattccgcgatgccgccagcggtattgtcgacgtgaatccggacctttgcgtcggctgccagtactgcattgccgcgtgtccctaccgcgtgcgctttatccatccggtcagtaagacggcggataaatgcgatttctgccggaaaaccaacctgaaagcgggcaaacagcccgcctgcgttgagtcatgcccgacgaaggcgctgacgtttggtaatctggacgatcccaacagcgatatttcccgtttgttgcggcagaaaaccacctatcgttacaagctggcgctgggcacaaaaccgaaggtctaccgcgttccctttaactatggggaggtgagccaatgacatccgcttctgcatttcattttgcatcactggtgtgggactggcccatcgccatctatctgtttctgattggcatctccgccggactggttacgttggcgattctgctgcgccgcttccatccggaggcgggcggttcggacagtacgctgctgcgcactacgctggtgttagggccgggggcgattattcttggtctgctgattctggtctttcacctgacgcgcccgtggaccttctggaagctgatgttccactacagctttacctcggtgatgtcgatgggggtgatgctgttccagttgtacatggtagtgctggtgctgtggctggcgaaaatctttgaaaaagaggtgattgccctgcaacagcgttggctgccgcggtcagggatcgtgcagaaagtgctgacgctgatcgcgccgtttcatcgcgcgctggagacgttaatgctggtactggcggttctgctcggggcgtacaccggctttctgctgtcggcgctgaaatcctatccgttcctgaataacccgatcctgccggcgctgtttctgttctccggcatctcctccggcgcggcggtggcgctgatcgctatggcgttacgccatcgtagcaacccgcacagcaccgaggcgcgctttgtacatcgcattgaaaccccagtggtatggctggagatcttcctgctggcggccttttttatcgggctggcgctgggcgatgacggcaaaatgcgcgcgctggcggcggcgctgggcggcggattctggagctggtggttctggcttggcgtcgtagggctgggattgattatcccgctgctgctgaagccctgggcaaaccgtagcgtcacgtttcacggcgtgctggccgtttgcggcgccagtttgaccggcgtgctgctgctgcgctttttcattctttatgcgggacagctaacggttgcataatctggacatcttccttcctgaagccggatttctggcgctgttgttgagtctcggggtcaacgtgctgaccccgctggcgacgtggtgcgggatggggcagcactggcgcggcgtcatgcgcctgacgacctgcggcgcgtggacggcgttcacgctgctgctactggcgtttgcgattctggttagctgttttctgaccagcgatttttcggtcgtttatgttgcgcagcatagccatagtcagttgtcatggggactgaaactggcggcggtatggggcggtcatgaaggttcgctcctgctgtgggcgctgcttctttcggggtggacggcgctattcgcctggcgctcccggcatgaatctgacgcgctttttccgctgaccctgagcatcttgtccttcattatggcctcgctgctgctatttattgtgctgtggtccgatccgttcctgcgtattttccctcccgccatggaagggcgcgaccttaatcccatgctgcaacatctggggctgatcttacatccgccgctgctctatctgggttatggcggcctgatgaccgcggcgagcgtagcgctggcttcgctactgtgcggcggctttaacgccacaaccgcctgggtttgctggcgctgggcgttaccgggttggtgcgctctgacgctggggatcattctcggatcgtggtgggcatattgcgaactgggctggggcggctggtggttctgggacccggtggaaaatgcctcgttgttgccgtggcttgccgccagcgcgttgctgcacagtctgtatgtcagccgccagcgcgggagcttccgccactggtcgttgctgctggcgatactgacgctgatcctctcgttgctgggaacgctgattgtgcgttccggcattctgctctccgtccatgcttttgcgctggataacgtgcgcgcggtgccgctgtttatcctttttgccgcgttaagtctggcatcgcttgctctgtacggctggcgggcacgggagccgtatccggcgacgcgtttgggcggcggaaagtgcgaaacgctcattctgacgacgctgctgctctttagcgccgtcttgttgatcgtgctggtcgggacgctctaccccatgatttatggtttgatgggctggggaaggctttcggtgggcgcgccctattttaatcgcgtcacgctgccgtttggcctgctgatgctggtagttatcgtgctggcgacaatcagaagccgcaaagtctctgtgcgttgtcagcttccggcattgctggcgcatacgggcgtatttatcttcgccgccgggatcatggtttccagcggcagtcggcatgaaatcagccttaacctcagccccggtcagcaggtggtactggcgggctatacctttcgtttcgagcgtctggatctggaagccaaaggcaactacaccagtgaaaaagcgcggatcacgttgtggcggaatgaaaaacgcattggcagcctgcagcctgaaaggcgcttctatgccgcgcgtcgtcaacagatgatggagccggggattcactggaacctgctacatgactggtacgcggtgatgggcgaaaaaaccggaccggatcgttacgccatgcgcttatacgtgcagaccggcgtgcgctggatctggggtgggggattgttgatggtgtgtggagcgctgctgagcggatggcgggggaggaagcatcctgagttattgcctgatggcgctgcgcttatcaggcctacgagtgaaaagcatggtaggccggataaggcgttcacgccgccatccggcaaaacgatgttacttttggctttactgatttttctgccttttgccacccatgcccaggtggtggacacatggacgtttgccaacccgcagcagcaggagaaagcgctgtctattgccagtcagctgcgctgtccgcagtgtcagaaccagaacttgctggaatccaatgcgcccgtggcggtcagtatgcgccatcaggtttacagcatggttgccgaaggtaaaagcgaagcggaaatcaccgcctggatgaccgaccgctatggtgatttcgtgcgctacaacccgccgctgaatgagcaaacgctgctgttgtgggcgctgccgtacctgctgttattgctggtgggcgtggtggcctggcgggtgagaaagcgtcagcacgcaggagagggggaacaatgagccagtctgaacactccactgcgccgttacgtcccatgcctgtaaagcgtctggcggctgcggcggtgttgatggtggctgcctgtgtcggcggctatctgttgacgccgaaatggcaggctgtgcgtagcgagcaacagcgtctggccgatccgctacgtgactttacgaacccgcaaacgccagaggcgcagctttccaggctgcaagaaaaaatccgcgccaatccgcaggatagcgagcaatgggcgcggctgggcgagtattatctctatcgcaatgcgtatgacaatgcgctgctggcatatcgtcaggcgttgcgtctgcgaggcgataacgcgcagcttttcgccgcgctggcaacggtgctgtattaccaggccgggcaacatatgacgcctgcgacgcgtgaaatgattaataaagcgttagcgctggatgcgacagaagtgaccgcgcagatgctgctggcggcggatgcgtttatgcaggcggattatgcgcaagccgtgtcgctgtggcaaaccttactggatgccaactcgccgcgagtgaaccgcgcgcagctggtagaggccattaatttggctaaattgttacaaaatcggcagaaataattttttcttttttgtgacttttgtcatgtgtgctgtttaaaaaaacggcgaatgagacacaagtaaaaattaattacctcagtgtattattcatttttgacgaagtaaaaaactttccataacaaatagttattcatcattaacgccataaactcgcgttattatgcataaaaacagccaaaagccctgttatgaaagggttgcgcaagacgctatgcaaatgatactgattatgcgcgttaaaaaactctacaaaccaacgcaacacaaatcataccctttcagtatgtattgctctcatgctttcggcggagagcaacgcttcatcgaggaagtctgttgttatgaaaaatttgaaagtcagcctggcctggcaaattttgctggctatggtgctgggcattctgttgggcagctatctgcattatcacagtgacagtcgtgaatggctgattgccaacctgctgtcgcctgctggcgatatctttatccatctgattaaaatgatcgtcgtgccgatcgtgatctcgactctgattgtcggcatcgccggcgttggcgatgcaaaacagctaggccgtatcggcgccaaaaccattctctattttgaactgatcactacggtggcgattatcctcggcattacgctggcgaatgtctttcagccaggctcaggcattgatatgtcgcaactggcgaccgtcgatatttcgaaataccagaacaccacggcggaagtacaaagtcatgcgcatgggctgatggggacgatactgtcgctggtgccgaccaatatcatcgcatcgatggccaaaggggatatgctgccaattatctttttctcggtcctgtttgggctggggttgtcgtccctgccggcaacgcaccgcgaaccgctggtgacggtatttcgttccatctctgaaaccatgtttaaagtcacccatatggtaatgcgctatgcgccagtgggcgtttttgcgctgatcgccgtcacggtggcgaattttggtttcgcgtcgctgtggccgctggcgaaactggtgctgctggtacactttgctattatcttctttgcgcttgtagtgctgggcatcgtggcgcgcctgtgcgggttaagtatctggattctgattcgcattctgaaagatgaattgattctggcgtactcgaccgccagctccgagagcgtactgccgcgcattatcgagaagatggaagcttacggcgcgccagcctctatcaccagtttcgtggtaccgaccggttactcatttaacctcgacggctccacgttataccagagcatcgccgccatttttatcgcgcagctatacggtatcgacctgtcgttgtggcaggaaattgtactggtgctgacgctgatggtgacgtcgaaagggattgccggcgtgcctggcgtttccttcgtggtgttactggcgacgctgggaagcgtgggcattccgctggaagggctggcgtttatcgctggtgtcgaccgtatcctcgacatggcgcgtactgcgctaaatgtggtggggaatgcgctggcggtgctggtgatcgccaagtgggaacacaagtttgaccgcaaaaaagcgctggcctacgagcgcgacgtgctgggcaaatttgataagaccgcccaataacggattgccggatggcgctttgcttatccggcctacagcgaaagagaatgtaggccggataaggcgttcacgctgccacccggcaacctactccgggttgcctgatggcgctacgcttatcaggcctacaacgactacgttcatcaggcaataaacatcagccattcgttagcgtttcgaactcttcgcaaccggtatcaaacccttccagacagcttagattcaaccagtgcaacgccttctgcttattcttttcaataaagcccggttcaccgtttaaaaacatcattcccgcccagtattctgaatagccggtacgggaaatggcggaactgcgtttgaaataccaggcggctttttcatcatcggcggcaatgcccacgccgttggcgtaaatcaggccaagcaacatttgcgcatccaccgcggagtcgttatccagatcttcagaggccttttgcagcagcgagatggcttttgggtagtccgggcgcccggcctgggtgttgaccaggatccgcgccagcgtaatttctcccgctttactgcccgcgttagccgccttttcagccagctttttcgcgtcgggataatccaggcttaccggattagtgattttgatttgcgccagtagcgcgcaggcgtcggcgtcgccactgtcggcggctttttgcgcccagtattcagctttgttcaaatcgccatagctcaaccaactgtcggccagaaaatattgtgcgcgtctgtcacctgcctctgctgcctgcaaatactggctacccggctcaggatctgcggcatgggcaaagaatgtcataaacaacatcaatgcaagaagtagtttcattttgagttttatttagggtacggaaaagacagtataaagagatcgtatggataaaaaaacagcctccgggcggaggctgttatagggaaaatgcctgatggcgatgctaatgcatctaatcaggcctacagtagacgcaggccgaataaagcattctgatgccgccatccggcagatcaacccattgcgctttcgcgcaggcgggttttcagcttgttgtactcatcaatcacatactgctcggcggctcgctgatcggcgatcggctcaacgcgtacggcgcagtatttgtactccggcgttttggtaatcgggctgaggttttcagtcaccagctcgttacaggcgccaatccaccactggtaggtcatgtaaatcgcccctttgttcgggcgatcgctgacctgcgcgcgggtgatgattttacctttgcgcgaatgaacccacaccagcgcttcatcttcaatgcccagacgcgcggcgtcggcggtattgatttgcgcatagcccggttcatcggccagcgcggccagcgccgcacagttaccggtcattgagcggcaggagtagtggccgacttcgcgcaccgtcgacagtaccatcgggtactcttcggtgagtttatcgataggcgctacccagtcgcaggtgaagaactgcgccagaccgttgggggtatcgaacttctctttaaagaggtacgaggttccctgatcggcatctgacgtgtcgcggcacggccactggatataccccagctcgcccattttctcgtaagtggcgccgtagaaatccgggcacagatgacgcaactcatcccagatctcctgggtgttgttgtagtgcatcggatagcccatccgggtggcgatttcactgataatctgccagtcggttttcaggtcccacttcggctcaacggctttaaagaagcgctggaagccacggtcagccgcagagaagacgccttcatgctcgccccatgaggtagagggtaaaatcacatccgccgccgacgcggttttggtcatgaagatatcctgcacgatgaccagttctagatcctcaaacgctttacgtactgcagagagttccgcatcggtttgcagcggatcttcacccataatgtacgccgcgcgcacttcgccatgcgccgcacggtgcggcagctcgctgatgcgatagccggtatgcgcaggcagactttctacgccccaggctttagcgaacttctcgcggttttccgggaacttaacgtactggtagcccggataagtatccggcagcgcgcccatatcgcacgcgccctgaacgttgttctggccgcgaaccgggttaacgcccgcgcttggcttgccgaggttgccggtcagcatcgcgaggctggtcagtgaacgcacggtttccacaccctgatagaactgggtgacgcccataccccacaagatcgctgcgcttttcgcgctggcatacatccgcgccgcctgacgaatttcctgtgcgctcacgccagtgatctcttcggcggactccggcgtatagccttcgacaatcttactgtattcttcaaaaccttcggtacggctggcgacaaacgctttgtcgtacaggttttcttcaataatgacatgccccatggcgttgagcagcgcgatattcgagccgtttttcaacgcgatatgcatgtcagcaatgcgcgcggtttcaattttgcgcggatcgcagacgataattttcgccccgttgcgtttagcgttaatcacatgattcgccacgatagggtgggaatccgccgggttatacccgaagacgaacactaaatcagtgttatcaatttcattgatagcattactcattgcgccgttaccgaccgattggtgcagacctgcaaccgatgggccgtgtcagacgcgagcgcagcagtcaacgttattggtaccaataacggcgcgtgcgaatttttgcattacatagttggtttcatttccggtaccgcgagaggagccggttgtctggattgcatccggaccgtacttcgctttgatggcgctcaaacgttcagcgacgtaattgagcgcttcatcccaggaaacagattccagtttgccgccacgctggcgacggatcattggggttttcaggcgcggggtcaggatctgggtatcattaataaaatcccagccgtagtagcccttcagacacagggtaccctggttggttttcccctgcgccgcctcagcccggacgattttgccgttatcgaccaccagattgattttgcaacctgatgcgcaatacgggcaaaccgtgacgacttttttcatcggtttcgctccagttaatcaaatcgcgcatacgcgctgtcgccctcagtatgcatgttttatgccacttttttagtatgggctttccctgatattacgggcgaattttgctcaaaaccctgacgaaaaacaggctatcgtcagttttgacgtgtcgaaagaaaatgccgcatgacatttattatggggagaaacgcggagcgcaggccagataaggcggagccgctatccggcaatctgctctgcctgaagtggaaattatccggatggatagactcaaggccagggaacgctttgagactaacgccaggatagaacaggccgcggcaggcagttccataccgcggcccggcttcagaggaggctgaaaaggattatcgcggcaaaaatagcagcaataacgagatatttcagcgcgtaatagagagtgcggtttttctttttcagacgttgcccggcatcgcgtgctgcgtgaacgtatttaaagatgcgattaatcgcaccggtgcgatcgttctcgtcgtttggcgaactggcggcggacatcaacgatgcgccgacccagtggtttacgctctgcgcccagcgccatttcattgggcgctcaatatcgcaaaagaggataatacgcgtctgctcagttttattttccgcccaatgaacgtaggtttcgtcgaagatgacggctttgccgtcgcgccagctatggcgctgtcgatcaacttcaataaaacagcggtcgtcattcggtgtgcttaatccaagatggtaacgtactgaaccggcataggggtcgcgatgttttcccagataggccccgggaggcaactcggcgaacatcgccgctttaatagaggggatgctgttgaccagctttgtcgttatcgggcataacgtttccgccgacgggtgggcatcggaataccatttaaggtaaaaccgtttccagccgcgcttgaaaaaggtattgaatccggcgtcgttattggcctgcgcggcttttatgtgatgctgaagctgtagtgcctcttcacgaatcacctgccagttttccgtcagcttctgcagctctggaaatgccgtggtatcaaagtacggctgctttgccggtaacgttgagaagcgagtcatgaacatattgatcggcgccataaacgtcgagtggtcaaagagctgacgggaaagtttttgtttttccaccccgcgtgaatgcgcataaatgacgctgataataaaaataccgataatgattgctgcgaacataacgtcactgtccttctaagaaaacctcatcccgggattttcaggcaaccctcccggtgatgccaaagagaaaagtgtagttcgttgacaataaatttacatttctacaacttaaaagggccatttttgctaaagaagcgagtcagcccgtttaacctttatccaggcttgtcgacagtagaattgagatgactccgctacttcacccggtgatggctgattacgttatgccttatctcccgatgacggctgccagatcacaatgctttcgtaaaccgaaaatgactttgcttgtaaccttcgcgaagataaaaacggtgtgcatcgcggcgtttaatatttgtggaaagctccgttagctcggcgcccgcctgacgtgcttcttcttctgcccaggccagaagctgactgccaattttttgtccccgcatcggcggtaataccaccagctcctgaatttcgccaatccagttggcatgatggagatgaaactgcatatgcaggctgatcatgccgaccacctctccgttgcgcagcgctaaacgataatgaacgttggggtccagtaaattagcggcgaatccatccctgaaagcctgataatcaagctcatttttaagtaactcacagataagcgcgtaaacagaatcggtatcctctgttgtcgcgtggcgtaattcacagactggcataacgtcctcccgacgcctcatcaggatcaaccatctttcgccagactgtagcaaactaccgtcattatttattctatgacagttaaacggcggataacgtgcagccaaagatcactctgatggcaagggggagggcgagcctcccggggagttaggtggcaggctgatgtttaaccacgttaatcatccacggcacaccgaaacgatcgctgaccttgccgaaaccctgcgcccagaaggtctcctgccagtccatttcgatttgcccttgtgcggcaaggttatcaaaccagcgcttcccttctgctacatcctgggtatcaagcaccagcgtaaagccggaataatgcgcccttcccgacgcgctggcatcactcatcatgatatcgctgccggcaatgcgcatgttggcgtgggcgatagctgtatcgggaaagcgcattcctgacgggcaaccctcttcgttatccgccgccgaggggggcatttcaccgaagctgagtttataaagcagttctgcgcctaacgtttgttgataatacgcgatggcgtcggcacagttgccggcaaaagagagatagggacttaacggcatgatggttacctcaggtaagagatgctcgttaagtgtagttcgaaattggcacaatattgtcggtggcagggccgctcaggcccggtaagcaaggcgctaccgggcaatgacacggtaaatcagttctttttcacgaactcggatttcagtttcatcgggccaaaaccatcgattttgcagtcgatgttatggtcgccttcaaccagacgaatgttcttcactttggtgccgattttcagcatggaagagctaccttttactttcagatctttcacgatggtgacgctatcgccgtccgccagcaggttgccgttggcgtctttgacaatcagctcatcgctctcctgagcgggttccgcatcgttccattcgtgagcgcattccgggcagatgaacatgccgttatcttcgtaggtatattcggagttacattgcgggcagtggggtaatgacatgttggtatcctcaaaaagtcagcgggggcaaacgcgcccaaaaatggcagatcgccgaaaaaggccgcaattatacacaaaatccttagcgttgtcgggactattgccgcttttataaaagggtctgcgccacgccagtcagcaatggtttacactcgaataaccgcttttttactgtcaccacagcgcattagggcgtccttatttacaccttttgaccgaattgacatatatgtgtgaagttgatcacatatttaaaccctgttagggtaaaaaggtcattaactgcccattcaggcgtcaacaggttcggttgtacagtccgtaaccggacagtgtaagtaaacctgctacgcttgtatgagggatagcgttcgcgcccctccctccgctcgacggcgacgctggcgcggtatgccagtgcccgccgtatatagcgctacagggcttagcctatgaggacagctatgctgaaaaggaaaaaaataaaaccgattacactgggcgatgtgaccatcattgatgatggtaaacttcgcaaagcgattaccgccgcctcgctgggcaacgcgatggagtggtttgattttggtgtttatggatttgttgcctacgcgttgggtaaagtctttttccccggcgccgatcccagcgtccagatgattgccgcgctggccacgttttccgttcccttcctgattcgtccgctcggcgggttattctttggtatgctcggcgataaatacgggcgccagaagatcctggcgatcacgattgtgattatgtcgatcagtaccttctgtatcgggttaatcccctcttacgcgacgatcggtatctgggcgccaatactgttgttgctgtgtaaaatggcgcagggcttctcggttggcggggaatataccggcgcgtcgatctttgtcgcggaatattcgccggatcgtaaacgcggatttatgggaagctggctggattttggttctatcgccggattcgtgctgggcgcgggcgtggtggtcttgatctcgacgattgtcggcgaggagaatttccttgagtggggctggcgtattccgttctttatcgccctgccattggggattattggtctctacttacgccatgcgctggaggagacgccagcgtttcagcagcacgtggataaactggagcagggcgaccgcgaagggttgcaggatgggccgaaagtctcctttaaagagattgccaccaaacactggcgtagcctgttgtcatgtatcggtctggtgattgccaccaacgtgacctactacatgctgctcacctacatgccgagctacctgtcgcataacctgcactattctgaagatcacggcgtgttgattatcatcgccattatgatcgggatgctgtttgtgcagccggtgatggggctgctgagcgaccgtttcggtcgacgtccatttgtgattatgggcagcattgcgctgttcgcgctggcgatcccggccttcatcctgattaacagtaacgttattggcctgatttttgcaggtttgttgatgctggcggtgattctgaactgctttaccggggtgatggcctcgacattgccggcgatgtttccgacgcatattcgttatagcgcgctggcggcggcttttaatatctctgtattgattgccggtctgacgccaacgctggcggcctggctggtggaaagctcgcaggatctgatgatgccggcgtattatttgatggtcatcgcggtgataggcttgattaccggtatttccatgaaagagacggccaatcgtccgttaaaaggcgcaacgccagcggcgtcggacatccaggaagcgaaggaaattctgggcgagcattacgataatattgagcagaaaatcgacgacatcgatcaggaaattgcggagctgcaggtcaaacgttcgcgtctggtacagcaacatccgcgtatcgatgaataaatttcgcgcttaaggttcgcttaatctctcgcgggcatactctcctccatacctttggaggagagcgtcatgaaaagctatatttataaaagtttgacgaccctgtgtagtgtgctgattgtcagcagttttatctatgtgtgggtcacgacgtattaaacgcctgttatgcctttttcaacagcacccaggcacgggtgcctgttctttccgtacggttttgcaggaaaaactgtccctgatgtagttgggtgatgcggctgacgatactcagccccaggccaattccgccataacggctgtccatccgcacgaacgcttcgcttagcttcccgcatttgctttcatcaatacccggcccctcgtcttcgaccgccataatagcgtcggggtcggcgctaatgtggatagtgatatgggttccttcagggctatagcgatgcgcgttttccaccagatttcgcaacagcatacgcagtaacgtcgcatcaccgcgcaccaccacgtccgccgcgctttccggcagcaacagagtttgctggcgcgtttccagcatggtgttcagctcatcgtaggaggggaggatcacatcttccagcagttttacttcctgataattcccggaagagaatgactggcccacgcgcgccagttgcagaagctgggagacgctatccatcatctggtcaagacgggcgataagcggcgcgacatcaacattgtgggtttttgacaataattccaggtgcaaacgcacccccgacagcggcgtgcgtagctcatgggccacatcggcggtaaaaaggcgttcattgtcgagcgtggtggtcaaacgcgtaaccagttgattgatcgccgagacgacggactcaatctcaagcgtggagctgtgaatggcgatcggcgccagattatccgccgtccgcgcttccagctctttttgcagttcggcgagcggacgggtaatacgccgtaccgcctggtaacaaattagcagcgtcaggctaaccataaatacgccggggacgatcaggctggcgaccgcctcgcgaatttcgtgcatgatatggcgatcgttgttgcgattatcccgcagcgcctgctcgaacaattggatttgctcagtgctttcatgccataaccagaaggtactgattaactggaacaccagcagaataagaccaattgtcagcattaaacgctggcgaagggtcatcgctcttcgctgaaaacgcatcaggctcacttagctttcctcagtggcaaccagcatgtagccaaacccgcgaaccgtgcgaatgcgcgacttgccgactttgtcgcgcaaattatgtatatgcacttccagagtgttggtcgagggttcgttatcccagttgtagatatcgttataaagaatttcccggtgcaccggactgcctgccttgagcatcaaccgtgagagcaacgcgtactccttaggcgtcagggtcagttcctgtccatccctccatgcctgatggcggcctatattgagcgtcagattgccaaccgtcagttcactttcaccctggttattatggcggcgcagcagcgcgcggatgcgggcgtgcagctcctccagggcgaagggtttaaccagataatcatctgcgccgacatccagcccggtaatgcggtcattgagcgtatcgcgggcggtcagaatgagtaccggcagggtatattttttctgtcggattcgcgtcaggaaatgcaggccatcctcatcgggcagccctaaatccagcaccatcagactgtaatgaccagactccagactatgctcggcggcacgcgctgtcgaaacgccatcacacgcatagccttcggtttgcgcggcgagtattaacccctgtaataatagcgtgtcgtcttcaacaatcagtatcttcattcgcttagtctcctgcacggttgcagaatatcatctgcggcctggtaatacgtcgtttgtacgccggttaatcccagcatggttgagaaaagattgtcctgtgaataatccagcgtgctcgcccgtttttgcaggcaggcctgatccacctgataacgctgttgataatctttagaaagccaaatgagcatcgggacatgtttttgcgtatccggcgcaatggaatacggcaaaccgtgtaaataaacgccattttcacccaatgattcgccgtgatcggaaagatagaccaggctggtggtgaatttatcctgatgagatttcagcaggttaatggctttatctacaatatagtccacgtacagcacggtattatcataggtgttgatcaactgctcttgggaacagttctgaatttcgttagtgtcacaggttggggtaaattttttaaactgcggtggataacggttgtaataggttgggccgtggctgccgatggtatgtaatacaataacgccatcgcctttcaaatggtcgatatagtcttccagaccgtgaaataacacttcatcgtagcactcgccgtcgatacattgtccgggcaggtttagctcggtgacattttgatgcggaacgcgatcgcatgcgcctttacagccgccgtcattatcattccacagtacgttaatccccgcgcgctggataatatccagcagcccttcctggtgatgcgccagctcttcgtcataatgtttgcgcggcatatcagaaaacatgcagggaacggagatcgcggtcgccgtaccgcaagaggtggtatgcgggaagtagatcacatcgtctttcgccagccgcggattggtgtcgcgcggatagccgccaagagagaaatcatcgccgcgcgaggtttcgccaacgatgagaatcgtcaggtttttgcgatcgcctttcagcattaatggattgcgatgggcatcctcgccaatgcgtaccagcggcaaattcgccagccgttgatgtgaataccatgaccaactggcgacaatactgttcgatgggcttaatgctttgatcaactgtttattatttcgaaataacgaggcgtaatctttatagaaaaaggcggcgaccagaataactaataaaatagagatcaggacgctggccaggcggtaaagcccgctacgtaagcgcggcgtcgccggacggattttgacccagaaggcaatcacggctgccagaacgccgcttaatcccagcgtcagcaccatttgcggcgtcatcagcgcaaaggtttccgcgggcgtggtatccatcatattggcgatcatggagcgatcgatgatgatgccgtaagtcaaaataaaatactgcgcggcagcgccgaccagaataaaaacgcaggccagcagtcggtttagccaaataaatgaggccagcgtcagcacactattgaccacgctaaacgcgacgaccggcatggaaataaacaccagcacattgcgcagcgagtttaacggtaggtcttgtagtacctgcttgtagaacgcaatgttcaggcagacggcaatataaaaggaaaaaagcagaagccaggcgatttgcccaagaacaggtcttttaagaaagcgctttaacatgttgatgcgtccatcgattcggtgacgctaatcgtgacaaagtaaaattaagtgaaccttaagaacttaatgttggtggcggccggataacctgcgctatccggcctgttgcgataacattaactacacgtggtcaatcctgtttaaccggcgcatccagcggatacgggtttttgtgaatgcggttgtagttcaacgcatacagcgcggtgatcaccatcaacgtgacgaacgaccacatcacttctttggcgccggaaccgatgaccgcccagatgcaatacacaaacgcgacgaaggtaatcagcagatacagcgggcgcgctttaccaaagtgaccgtggcccaacagtaacagcgcggcacaggtgtaaagataaggcaccagggtgaagataaccgacacggaggagaccagaccaaactctttcgcggcgttcggcgacatactgctgaactggaagatagtcatcagcacgccgacgataagcaacccagccactggcgtaccggctttattaacccgtgcgaagattggcgggaagagaccatcgtccgccgccgcttttgcggtttgaccggcaagcagcgtccagccgccgagagagcccaggcaacctgctgccgcacagaaggaaacaatagcccctgcggtatcgcccagcgccatacgcgccgcgtcaccgaaaggcgatgccgacacgcgcagcgccgcgttggggatcatccccataatcgccgttgtggagagcacatagcagacggcggcgatcagtaccccgccgatggtggcgataggcacattgcgtttcgggtttttgaccacaccggccgcaacggaggcactttctaccccgatgaatgaccacagcgtaacgttcaacgtgctttgaatcgcgccgaaggtattcatgccgctcacgttccaggccgccatataggtttcgcctttaaaccagaaccagccgaagaccgcaatccctacgataggcaccagcgccagtacggtggcgacggcctgtacgcgggtaatcattttcggcccgacgatgttcagcagcacaaaaatccacagcaccgcgacgcaggtaagcgttaataccagtggatctttcagaattgggaagaaatagctcagatagccgacgccgataacgaccatcgcgatattaccgatccagcatgccagccagtacagcacgttcgtttgatagcccaaaaacggcccgaagcagcggcgtgcgtaggcataggaaccgccgggactgggatctaaggacgacattttggcataaaccatcgacagcgccagggcgccgatgatagtgaccagccatccgtagattgcaatcccgccagtggccgccaggttagcagggagtaagaatacccctgaacccataatattccccgataccattaaggtgacggggattaggcccactttgtgagcatcagcatccgaagacataatttggactcctgaaaaggtgacttcgttacgataaattacgtcgtatcataccccctcagaatgccgctgaattatgtcggagacgggttatcgccaatgctgctattatcgtgtcttatcgttgagtgtagaaaaattaggcagccgatcgttcccgatgttggctaacataatgcaggggggtcataccataaaactctttaaacacggaaataaagtacgatgtgctgttatacccacacagctgtgagacttgagagatattctttccgtccattaataattggtttacggcataacgcattcggcaggtcgtgattatttggctataactggtattctcgtttttgagctttttctttaacaagcttggactcaggcacaggcaactggcaacggcgctcagattccagtctttatgaatatcgctctgaatgatgtggtaaacgctgtcactgatgcggctgcgcagcatgtgcattaacaaagaaataaattttttgtggtcaagaaagcgggataaaacggtgaaaaggagcgcacgggtacgttcactaacaatttcatccggtgcttccatcgcgctgtagcgggcggcgaccctgaagatatccggcgtcagacagttggcggtcaataagggatcggcgttgcgttgccagacgggaaggtgtgagagatctttattcaggaattgtaaatagtctttaatattattgcgactcacttgtattactagcacgctatttaatgatgaaatgtcaataacgttattttcacaagccagaatggccatatgattcgcttttaagctgattggctccttaccatttactcgtaaccatgtatctttttcggttaataacactatgcaaggttcgttgctgcaaatcctcatacccgaactcctggaatatgaacataaaagaccggatctcgccaaacgggagagataacggggactgagtcaattgtgtgatgaattgaaactgcactaaaataactttcctgaataatattacaatatttgtacgatgaattagggtgtacaaaaagttgtacgcgagtggaaacttgtcatttttgtataaaaaaagcgcgggatggggcccgcgcaaaaaggtatgacagtattattgttttgcagcaatactcagggaatacatgccatcctcaaaaaaaagactctttgtgattaggctttcacgcacataacgtgatatacgccatcaataatttccgtgccttcggtttcatgctcaaagccagggaagtgatgatcccaggattgcagtgagcgtaagtaacccacctgcggactgttttcatcgccaaagttttcgccggagagcagcatcgggatgcctggcgggtaaggaataacggagttcgccgcaatgcgacccggtagattttcaatcgccaccatttcaatattgttgttcacaatcgcgttgtaggcgtcgcgcggggtaatctccgcaaccggcagggtggaataggcggcgttgagacgggcgcccgggttattttcacgtagccaggcaaacattttatcgcccaggtcatgaatacccatgttcgcgtaagtgtcaggataatcctgcaccagttccggcatcacctgcgccagcggcgtattcgcgtcgtaatgatgtttgaaggagcacagcgtgttgatcagcgttccccatttcccgcgagttacccccatagagaacaggaacataatctgaaagtcggtggtgcgggtcggcacgataccgtggcggccaagccatgctgtgaccagcgcagcaggtacgccggatgcttccagttcgccatcgtcgcccatacccggcgccaggatactgactttaatcgggtccagcatactccagttatccggcaggtctttaaagccgtgccaggtttccccggggcgcatgacccagcagttctggtcagtggctagcagttttgccggcgcgtcggcgaagtcatacgttttaccggtttgtggatcggtgacgacgtccttattccacggtttaaagaaccagtcgccttcatcggtaaactctttataaagacgcgccatcgcctgacggaaatcaaccgcttcgtcaatcacctcttgagtcagggacaggccgctgttaccgtccatcatcgataccgccacatcgttggatgcgcagatggcatataacggagaggtggtggcatgcatcatataggcctggttgaagcgggagaaattcaccgcgccacggccttcacggacgtgaatgtaggaagcttgtgaaagcgcattcagtagtttgtgcgtggagtgggtggcaaacacggtcggaccgttatggtcgcctggctcgccgcgcatcgcgtagtgatcgcaataaatcgggttgaagcgcgcatagccgtaccatgcttcgtcgaagtgaatgcgatcgctggtttttgccagcagatcctgcgcctctttggcgttatagcatacgccgtcataggtacagttggtcactacgctgtaagacggtttctgtccggctttagttttggtcagcgggctggcgctgatttttttctgcaaggtttcaggctgcatttcctgcgggtagattggcccaataatgccgtaacggttacggcttggcaccatatataccggtttggccccagtgaggatcagcccctgctcgatggatttatggcagttacgatccagtacaacgacatcattatccgtcatacaggcctgcataatagtacggttagaacctgaggtcccgacaactacggaccaggagcggtcagcaccgaatacgcgggcggcgtttttctcgctttcgccaaacgcgccggtatggtcgaggagtgaaccgagcgtggtacgctcaatccccatatcgctgcggaacaggttttcgccataataatcgtgataaaagcgaccggcaggcgttttagtgaaaccgacgccgccctggtgtcccggcgccgcccatgaatattcatgaatgtcgctgtatttcatcaacgcgttaaacagcggcggtaacagttgctggcgataccgggtcatggcggcaacggcgcgtccggcgataaagtcagcggtgtcttccagaatccaggcgaattcatcgacaagctccagcaggtcgcggtccagcgatgccgtcgctttttccctgtcgcctaacaggaaaacgggcacgttttgctgacgctcgtgaagcttaccgatcaattgcctgacgctcaggtgctcatccggttgttccatttggtagctaaacatcagacagtcaatggcttcgttcgcggacaagatggcatagccgtcatcgaaggatgtcgatttaatgacggtaacattttgttggctcaaggcatctgccagacgctcaaccgcgttgccaacccaggtgtcctgatgcagaaactcactttcaacaattaatactttcatcatcttttacccggttgtggaggccgtgcaatttacgccttgccgacccgccgtatgaatgtgacgtgggcaagtattaccccgtcaaatagggggtgtaaagtgatggaataatggtcggttattgatattattgtttaataaacaatgggttaattattgatattgagcgatttcacctgccgtttatcgacaggtgaattatttttttggctgatagtggtatccggctttagccgggcatcgtctggcgtcgttgctgacttagcttgcggtattgttgcggcgacataccgacaaatttgctaaaagtactgtaaaaacggctgctggatcggaacccggcagtcagagcgacatcgaggatcgttttgtcagtatcgctcaataaggcacgtacgtgattgatgcgcatcgccgtgatgtactgcttcatcgtcaattgcataacccgctggaatattcccatcgcgtaattagcattgagtttgacatgctccgcgacgtcgttaatggtgagcgcctgatcgtagttatcggcaataaatcccagcatctggcttacgtaaaactgcgcatggcgtgagacgctattcttgtgggtgcgtgatgttttattgagcaaaatgggttgccagccggaaaggctaaagcgtttaagcatcaggccgatttcatcgatcgccaactggcgaatttgctcattcgggctgcttgtttcctgctgccagcgcaacacttcaaaggtgctaagctgctgggtcgccagtgatttaaccaccatcccgtgcgtgacgtggttgataagatcgcgatccagcggccaggagagaaacaggtgcatcggcaaactgaaaatcgccatctggcggcagttgccggggcgggtaagctggtgtggcgtacaggcccaaaacagggtgatatgcccctgctttatctgcacgacttcattgttgattaaatactccacatcgccgtcaaacggaacattcacttctacttgcccatgccagtgactgctggccattctgtgcggcggcctcagttcaacgtccagtcgttgatattcggaatagagcgacagcgggctacgggtttgcttttcatcgccgttgcacatgtgcgggtcgggcgggaggagggatattgcttgcgtactcatcgtcactccatttcctgaattatcagaattatgcccctttagccgggaggaaaccgggaatccggacacagaatccgtcgatattgtagagcgtagcctgactatcaggccgaatactctgctttttacgccattttgtcccaaaaactcagatctcccgcgcgccagcatacgatctgagttttcgggaatgctcatcggggaagacggaggttttcaccgggaacgcgtgccaccatgaaggtgttcactactgttctggagagtcatgatgacggcacccaaaattacctttatcggcgcaggttctacgattttcgtcaaaaatatcctcggcgatgtgtttcaccgcgaggcgctaaagtcagcgcatgtcgccctgatggatattgacgaaacccggctggaagagtcgcacattgtggtacggaaactgatggactcagcgggcgcttctggccggattacctgccataccaaccagaaagcggcgctacaggatgcggatttcgtggtggtcgcctttcagattggcggctatgaaccctgcaccgtgaccgattttgaggtttgtaagcgtcatggcctggaacagacgatcgccgatacgctggggccgggcggcatcatgcgcgcgctgcggaccatcccgcatctgtggcggatttgcgaagacatgacggaagtctgtccgaaggccaccatgctcaattacgtcaacccgatggcgatgaatacctgggcgatgtatgcccgttatccgcatatcaaacaggtcggcctgtgccattcggtacagggaacggcggaagaactggcgcgcgacctgaatatcgatcccacctcgctgcgctaccgctgcgccggcattaaccacatggcgttttacctcgaactggagcgcaaaacggctgacgggacttatgtcaatctctatcctgaattgctggcggcctatgacgccggacaggcgccgaagcccaatattcacggcaatgaacgctgccagaacatcgtgcgctatgagatgttcaaaaagttgggctacttcgtcactgagtcatcagagcattttgccgagtacacgccgtggtttattaaaccgggacgcgaggatctgattgcgcgctacaaggtgccgctggatgaatatccgaaacgctgcgtagaacaactggcgaactggcataaagagctggaggagtataaaaccgccgagcgtatcgacatcaaaccgtcccgcgagtacgccagcaccattatgaacgctctgtggaccggcgagccgagcgtgatttacggcaatgtgcgtaacgaggggctgattgataacctgccgcagggaagctgcgtggaagtggcttgtctggtggatgccaacggcattcaaccgacgaaggtggggacgatcccttcccatctggcggcgatgatgcagaccaacatcaacgtgcaaacgctgttgaccgaagccatcctcacggaaaaccgcgatcgcgtgtatcacgcggcgatgatggaccctcataccgcagcggtgctgggtatcgaagaaatctatgcgttggttgacgatctgatcgccgcgcatggcgactggcttccggcctggttacgccgttaatctccagccgcgctggacggcagatccggcgtttaacctctactaacagaaggcgggcgctggtaacagcgacccggtaccctatgagcatctctctgacaacaaagctgagttacgggttcggtgcgtttggtaaggatttcgccatcggcattgtgtatatgtacctgatgtattactacaccgatgtggtgggactttcggtcggcctcgtcggcaccctctttctggtcgcgcgaatctgggatgcgataaacgatcccatcatgggctggattgtcaacgccacgcgttcgcggtgggggaaatttaagccgtggatattgatcggcaccttaaccaattcgctggtgcttttcctgctgttcagcgcccatctttttgagggaaccgcgcaggttgtatttgtctgcgtaacctacatcctgtggggcatgacgtataccattatggatatcccattttggtcgctggtaccgactattacgcttgataagcgagaacgcgaacaactggtgccgttcccgcgtttcttcgccagtctggctggcttcgtcactgccggtataacgctgccgtttgtgagctatgttggcggggcggatcgtgggttcggctttcagatgtttacgctggtactgattgcgttctttatcgcctcgactatcgtgacattacgcaacgtacatgaggtgtactcctccgacaacggtgtaacggcaggccgcccacatctgacgttaaaaacgatcgttggattgatatacaaaaacgatcagctctcttgcctgttgggaatggcgctggcgtataacattgcctccaatattatcaatggctttgcgatctactacttcacctatgtgattggcgatgccgatctttttccctattacctttcttacgccggcgcggcgaatctgctgacgctgattgtcttcccccggctggtgaaaatgttatcgcggcggatattgtgggcgggcgcctccgtgatgcccgttctgagttgcgcagggctcttcgcgatggcgttggcggatatccataatgccgctttaatcgtggcggcgggtattttcctgaatatcgggaccgcgctcttttgggtgcttcaggtgatcatggtggcggatacggtcgattatggggaatttaagctcaatattcgctgcgagagtatcgcttattccgtacagacgatggttgtgaagggcggctcggcgtttgcggcgttctttatcgctctggtgctggggctgattggctacacgccgaacgtggcgcagtctgcgcaaaccctgcaggggatgcagtttattatgattgtcctgccggtactgtttttcatgatgacgttggttctctacttccgctactaccgtttgaacggcgatatgctgcgcaagattcagatccacctgctggataaataccggaaaacgccgccattcgtcgaacagccggatagcccggcgatttctgtggtagcgaccagcgatgtaaaagcgtgagcatggtctctcgtgcaggccggataagccggataagcgtagcgccatccggcaattaaccgataacgcggcccgggagaacgccgggcctgccaggttatttcgcgcagttagcgcactgtttgctgacaatctgctggaagaaatcgttgcctttgtcatccaccaggataaaggccgggaaatcttctacttcaattttccagatagcttccatgccgagttccggatactcgacgcactccagatgcttaatgctctgctgtgccagtaccgccgccgggccgccgatactgcccaaataaaagccgccatgttttttacaggcatccgtgacctgctgactacggttgcctttcgccagcatgatcatactgccgccgtgggattgcagcagatcgacataagagtccattcggcctgcggtggtggggcctaatgagccagatggataacctgccggggtttttgccggacctgcgtaatagatgggatggtctttaatatactgcggcaggtcttcgccggattcaatacgctcttttagcttcgcgtgggcgatatcgcgacctacgataatggtgcccgtcagcgacagacgagtcgagaccgggtactgcgatagctgggcgaggatctctttcatcggacggttgagatcgactttcaccgcgtcgccttcgcccgcctgacgcagcgctggcggaatatactggcccggattgtgttccagtttttcgatccagatgccttcgcggttgattttcgctttgatgttacggtcggccgagcaggagacgcccatccccaccggacaggaagcgccgtgacgcggcaggcgaattacgcgaatatcgtgggcgaaatatttcccgccgaactgggcgccgaggccaagtttttgcgcttcttccaacagttcctgttccaggtggggatcgcggaatgcctggccgtgctcgttaccttccgccggcagcgcgtcgtaatagtgggtgctggcgagcttaacggttttcagcgtgctttccgccgaggtgccgccaatgacaaaggcgatatggtatggcggacaggccgcggtgcccagcgtgcgcattttctcaacgaggaagtttttcagcttgcctggggtgagcagcgctttggtctcctgatagagatacgttttgtttgctgaaccgccgcctttcgccacgcaaaggaacttgtactcgtcgccatcgacggcatagagatcgatttgcgctggcaggttgctgccggtattgacctctttgtacatattcagcggcgcgttctgcgagtagcgcaggttatcttcgatataggtattaaacacgcctttggagagcgcggcttcatcaccgccgcccgtccagacgcgttggccttttttacccatgataatcgccgtgccggtatcctggcaggtcggcagaatgcctttggcggcgatctcggagtttctcaggaattgcaacgccacatatttgtcgttttcgctggcttcggggtcatggagaatggcggcgacttgctgctggtgttcaggacggagcataaaagacgcatcatggaaggcctgttgagccagcaacgttaacgcctgcggctcaacgttgaggatagattctccattgaattcactgacgctgacataatcggaggtgagcagataatactctgttttgtcctctcccatcgggaaaggcgcctgatagataaactcttttttcgacatgtgcttccagcctaatagtaagaaaatgtattaagaacctcatgggccaggctctaagtcgcgcgccgcgcataaccgggcggcgcgcgcggccattacaggaatccgtacattgcggcaaagatccagccaaagacgcaggagacgctcacgccaatcaaacccggcagaatgaagctgtggttaatgacgaagcggccaatacgggttgtgccggaacggtcaaactgaatcgccgccagatcgcttgggtaggtcggcaggatatagtagccataacatgccggcgcagaggccacgatatacgccggatcgacaccgatagccagcgcgacgggaacaatcgccgccagcgccgctgcctgggagttaacaaacttggagaccagcagcagaacgatggcgtaggcccacggatactctttgaccatttcgcccagcacgccctgaatttccgacatatgcgcgccgaacatggtttccgccatccaggcgatcccgtataccgcgacaatcgcaatcataccggaacgaaaaacttcgttttttgagatagacgcaggattggttttggtcaggatgataatgagcgccccggtcagcagcataaacatctgaatgaccagcaccatcgacaacggtttgccgccgaaggttggacgtaagtcggagtccgcgcccaggagagcgaccacggcaatcgccgccaggaagatccacatcgccagccagttgcttttcggcagttttttatccagcagcgtcgcggtatcgccgtacacgtactgacggttttccggtacggaaataaatttctgaaacgcttcgtctttatccagatctttaccgcggaaccaactaaaaataccgattgccaggataccgagcagggtagacgggatggtgatcgacagcagatcgaggaactccagatgttttccgtcaaatgtcacgttgcccagcatcgctaccagagaaaccacggcgacggaaaccggactggcgatgatgcccatttgcgcgccgatagaactggccgccattggacgttccggacggatattattcttgatcgccacgtcatagataatcggcaaaatggtgtagaccacgtggcctgtcccacacagaatcgtcagggtacaggtgacgaacggcgccacaatagagacgtatttggggttgcgacgcagcagcttttcggcaatctgcagcatcacatccagcccgcctgacgcctgcaacgtcgccgacgcggcgactaccgcgataatgaccagcattacgtcaacgggcggtttgcctggctggagatggaaaacaaacaccagaatgaccagaccgataccgcccaacaacccgagcgcgatcccgccctttcgggcaccataaaacagacatattaatattatgagaagctgtatactaaataacatttttatttatcctcgcgataaacccagtcaattttgataaatggatcacagccatcttctgatttttgtgaatgagcatcaggaaatggcgaatattcaatgcgccagtggcgacgattaacgattaagctttttacagagttgctttaagtaattattttcttgcgatggtgatgttcagaggggagtaccctctggcgatgggcaggtggagtcagcgagagcagtaaattatgatttgtctgttttaaaaacaggcgtttattatttgatttttgtgtctcgccatcaggtaaatcacgagataaatcgaacagcatgtgacttatgtgatcattgtcacgccatttttttaaattattagtatggcgtgtggagacgcgtatctgctcaccaatatacgtattgtccataggcgtagcacaagctccattgctacaaacataattttatttaagtgtcaggaaaattccggacaaatcccttttttaataaaaatacacactctcggcatgggataatacttaattaacttttgttagcgttttgaaattaaaaacagcgcagagcgctgtaataatagaaaataacgttaacaggcctggggtgagtatatttgatctgacacaatttcccaggtttgttattaatgtgatagcgtttttattggcattgttataataaatgttaccaggatataacgcttcgcgtcggctttatgcggtatccttactgacaatattgtttcagtaaagagtaatgttccggctgaacgcggtagcggtaaaccggcctgccggtcacgccgtaatgaatactggtaaacaagatatggcaatttaccagccagatgagatatttacggcaggagacgcgtgagatattcacttcgttggccaactcgtcggtagaaaattcctgctcctgatgcgcatcaatccactggcataaggtgcgtagcgtttgctgcgtcagcccttttggtagccgacgaggctcctgctcgctggatgaattaccgtgaatgagcaggtcaagctcagactgttcgtaatactggcgtttttccatcgccgttttcttacgtagccaaccggtcaacgcttcttcaaagcgcgtggcctgaaaaggcttgatcagataatccaccacgccgtagtgaagcgaatctttaatggtggcggcgtcagcggcagaagaaatgacaataacgtcgcttttgcagcctgcgctgtgcaggacaggcagcagatccaatccgttttcctgctgcatatagatatccagcaggattaggtcaatgtgattttcactgttgaagataaactctttcgctttttccagcgtcgaagcggttccacaacaatgaaaaccggagatttgcgcgacatagcggcgatttaactccgcgaccatcgcatcgtcatcgacaattaatacattgatcataggctggtcctttttccatcccagggtaactgtacaaaaaattgtgtgaagatcccaggctcggactccacggaaattacgccgccaagcgcttcaacctgctgtttaaccagcgctaaaccgacgccgcgttcggcgcctttcgacgagacgcctttttcaaaaatcgcctcgatgcgctcaggttcgatacccggaccgtcatcgctcacttcgcaatgcagccagccatgacggtagtgtaacgagacgctgatttcgccgccggattcctggctcaacgcttccagcgcgttttcaatcaaattacccagcgccgtaatcagcaccgtaacctgatcttcattgttattatccggtaactggctgtcgctgcttatcaccaggctgtgcccgaaatcagaggcgcgggtaatcttactgagcaaaaagccagcgataatcggcgactttattttacccagcagcaaaccgatctcttcctgatagttattggccgtcttgataatatacgcttcaagctgcttataactcttcaggtgcaataatcccagaatcacatgtaatttgttcatgaattcgtgggatcgttcacggagcgcatccgcgtagttcaccatcccgtccaaccgctgcatcagttggcgaacttctgttttatccctgaaggtggatatcgcgccgataatttcgccattgctgcgcaccggaacggtattcaccagcagcaggcggcctttgacgatgatctcttcatcgcggcgcggcgtaccgtcacgcaacacttcgctaatgtccaccacctgcgaccaggcatgactcagggtggataatctggcgtcatcctgcgtttttcgataatcgagcagcgcctgcgccgcatggttaatcaacgtgacttcgccgctatcatccacggcgataacgccctctttgattgactgcagcatcgcctggcgttgttcaaacagggttgagatctcatagggttcgaggccaaacaggatacgtttcagcaccttgaccagcgcatacgtgcctaataaccccaccagagcgccgaacagaatggaccagataatactgccgcggctattgttgatctgctgcgtaacgtgactgagttccaggccaatcgctaccacgccgatctgccggtggtgttcatcataaaccggtgtgaaaacgcgcagcgctttggcaagaaagccgcgattaatggcaacgttttcctttccctgcagcgcgagcagaatgtcatcgcctttgaacggttggccgattcgctgcgtttctgggtgcgaataacggatgccctgcatgttggtcaccacaataaacaaaaagccattatgctggctcaccgcttcggcgagcgtctgaatgccgctttccgcaggcggttttttcagcccctcgcgaactgccggagagtccgccagcgagcgagccaccgccagcgctttatctgccagcgcgtcgcgcgtcatgctgctgatttgcgaaaaatagatcagatggaccacaacgagcaccgaaaacaaaacggcgctgaccatcagaatgacggtagtgccgagtttcatggggcgtttgcgtaacgcccggcatggcagggagtgtttcatagtggacctgagcggacgaatcgtaaggttattatccctgatgaggcgtctaattcaaaggcataggcgatgttgctccagtgttgaaaagcccgtcttgccttgcagggcgcgctacctgctcatgtcgttaattaatatcgccggataccgtgatgggtaatttattttcatcagaattacataaaataatttttcattaatttttataataacgtatgcggtatcacattttatttttactgacgttcagaatgcgtttgatcacaatcaatcagcgctaatatttaatctattatgattagttttcattacatattattaataattatggaagcaatgtgagaaataaaaaatggaaataaaaaaatggctgaacacaaccataacccgacgtgatgctattgtcgctactgcaaaagtaggggcggcggtgacgctaagccaggcgattacgctgccttttgctaccactgcccaggcgcaggataccccgataccgaaggatgccaacggcgaaaccgtcaggcacagcgcctgtctggtcaactgtggcagtcgatgcccgcttaaggttatcgtgaaaaatgatcgcattgtgcgtattgagccggaagacgcgaaagatgacgcggtattcggcgagcatcagattcgtccctgcctgcgcgggcgttccagtcgctggcgggtctatagcccggatcgcattaagtatccgatgaaaagagtgggaaaacgcggcgaaggaaaatttaaacgtatttcatgggatgaggccacggcctttattgcggcggaattaacgcgtgttagcgaaaaatatggccgggaagctatttattataattatcaatccggcgcgtattatcacacgcagggtagacccgcctggataagattactaaatctcaccggcggttatttaaattatcacaacacctattccacggcgcaaatcgccaccgccacgccttatacccacggtgattatgtcggtagccattttacgcagatcgcgcattccgatctggtggtgctatttggcctgaatctctcagaaacgcggatgtccggcggcggccaggttgaagagctgcgccgggcgctggagacctcgaaagcccgggtcattattatcgatccgcgctataccgattcggtgattaccgaacacgccgaatggctaccgattcgcccaaccacggacgccgcgctagtcgccggcatagcgcatacgctgattaccgaacagcttctcgacgaggcgctggtaaaccgctattgcgtcggctatgaccgtagcaccttgccggacacggctgcgcctaacgccagctataaagattatgttcttggcacgggcgatgacggtatcgcgaaaaccccggaatgggcggcggatatcaccggtattccggcaacgcgtattcgccaactggcgcgcgaaatcgcctcggcgcgcgcctgctatatttgccagggctgggggccgcagcgtcatgccaacggcgaacaaaccgtgcgtgctattcagacgctgccagcgttaacaggccacttcgggcggcccggcaccaacaatggcaactggccttacggtacgccgtatggcgtgccattgttgcctgtcggtaagaatccgatcacaacctctattccttgctatctgtggacggacgccattcagcatccggagaaaatgaccgcgacgacaatgggtgtgaaaggcgcggacaggctaaaaaccggaattaagctgtttttcaaccaggccggtaatactttgcttaatcagcacggcgaaacaaaccgcacccgtcaaattctcgcggatgaatcgctgtgtgaaaccattatcgtgattgaaaaccatatgacgcccagcgcgatgtatgcggatctgctgttgccggagaccagctatcttgaggcggaagacctggtggacagctcctatgcggcgggatcgcataactacatgattgcgattcagaaaaccgttaaaccgatgtgggaagtgcgcagcacgtatgacatctgcgcggatatcgccgggcatcttggactgcgcgagcaatataccgagggccgaactcaggcgcagtgggcggagatgcactatcagcagatccgtgaaaaacgtccatacctaccggagtggagcgtggcgaaagagatgggtgtgattgaccagcgtatcgctaccgagcagcagagccttgcgtttgccgatttccgcgccgacgccgaggctaatccactctccacgccgtcgggcaaaattgaaatttactcccaggcgctggcggatctggcgcaaacgtggactttgccagaaggcgagcgaattcccgcattgccggaattttgtccggcgaaagagtcgcaccttaacaaagcattgacggcgaagtatccgttgcagttaagcggcttccataccaaagggcatacccactcgacctacagcaatgtgctgatgctgcatgaggcggtgccggatgaagtctggattaacccgattgacgccagcgctcgccaattgaagtccggcgatcgggtgcatgtattcaatgaccgcggcgtggtggagcttccctgtaaagtgacccagcgcattttacccggcgtggcggcgatgccgcagggcgcgtggacgcggcttgacggcaacggcgttgatgtcggcggctgtatcaatacgctgaccagccaccacccttcgccgctggcgaaaggcaatccgcagcataccaatctggttgaaattaaacgcgcttaaggagtgatgtacgatgaaacagtatggcttttatgttgactcctcgcgctgttcaggctgtaaaacctgccaggtaagctgcaaggataataaagatctggatgtcggtccgaaactgcgccgcgtctatgaatatggcggcggaagctgggtgaaagagggggaaagctggcatcacgacacctttacctactacctctctattgcttgtaaccattgcgatgagccggtatgtgtctccggctgtccgaccggggcgatgcataaacgcaaagaagatggtctggtcgtggtggatgacagcgtatgcgtcggctgtcgttattgtgaaatgcgctgcccctacggcgcgccgcagtttgatacgcaggcgaacgtgatgcgtaagtgcgacggttgtcttgaccgactggagaacaatctgcgccctatttgtgtggattcttgcccgcagcgagcgctggatttcggccctgtcgatgaattacgggcaaaatatggcacggagaatcaaatcgcgccgctaccttcggcgtcgttcacccatcctaacctcattattaaaccgcatccgaaagcgagacccacgggcgatacggaaggcgcaatcatgaacattcgggaggtgcgccatgcatgagttaccgctggtcttttttacggtctttacccagagcgcggtcggcgcgtttattctgctgctgattggcggcgcaatggggctggtcgcgccgcggcgtaaggctatcggtctgttctcggtgatgtgcctgtttgggctgggcgtcattgtcggcaccttccacgtcgggcaaccgctgcgtgcgctgaatatgctgctgcgcgtcggacattcgccgatgagtaacgagattgtcctgtcggcggcttttgcggcgctcggcgggctgggggcgctcggtttgttgctgaaccgggcgacgccgctgtgtaacgcgttggtctggttggcggcgatagtcggagtagtcttcttatacgccgttccgcagatttaccaactgccgacggtggcgacctggcgttcatcttacaccacggcaatgatgatattgacgccgttgattggcggcggcgcgttggcggcattgtttggcgtgcgccgtctggggctactggtcagcgtgttggcgattttggtgagcttttgtctgcgcccgggctatatggcgacgctgatgagcgccgatagcgctctgaccgccgcgcagcatagctggtttaccgcccaggcgatattgctggcggcgggcgtggtcggggtggtggtctgcgcgcgcctgaaatcgagcgctgcggtgctggccatgacggctgtggtggttatcgcggcggagttggcgggtaggattgcgttttacaatctgtggacgctgccaatgtagttttttgcccggtttatgccatgtaagcctgatcagcgtagcgtcatcaggcgaaatatttcaggagctattgctatgctttcccgtgctgttttgccgcgtatcctcggcgcactgttttactactcccctgagaggccggaggtgaaagcgttgttcgattgtttgccaacgttgcctgagctttacccctggcgcgatcgtggatctattgaatcactgtgtgcgtcatggtcgctaccggatgatgatgcgcttacatggcaattttccgtattgtttgaaggccagggaaagatgcccgtcccgccctggggatcggtctatctggaaaaagataatttgctgatgggggaaaccaccgccgattatcgagcttttttacagtcgcagggcatggtattcactgaccgtgaacgcgagccggaagatcagtttggcctgatgctattggcctgtagcgatctgctggcacgaggcgacaacgtggcggccaaccggttactggaggcgcatctgctgccctggggattccgctatctggaattgctgcaacgcaataccgttagcgccttctatgcccggcttgccgtcgtagcgacctgttatctgcaggatgttcagcagcaacagggactacagcctgagaataagcggttgtttttctgaggtattggtcgggttttgatggcgtgccgtaatacttgtgccgccatcgtgcccgctgttgcgtcagcgggcacagtttactattacagctccggcgtctttttgaaaccggtcagcatcagcaccaggctctgttttgagtccgctggcgtgaagtcgtagtgatttccctgacggtcgccgccgatataccaggatatttccgttttcccttccgccagcgctttgcgcaccgctttatcgacatcaaccatgcgatactcatgtgaatggtccagatataacacggcatcggaacggtagttgatcgccggtttattgttccaggacacggtactgacgtgccagtcactgctggtcgggtaaaagaaaatttgatcggcgccgttcgcttccgttttgccgccaaaaaggcgaatacggtatttgaatagcgaagcgtccatattggcaggcaggggcgggatcttaaatttcaccagcgtgagcgtttccgggtgctgcgtgcgtccgccatttgtccagtcatcctgtacgtacaaggtatcgacgctggcatgaggcttgtcgtcttcgctgcttacccaggtattttcttccgctttactgtaggcgtaaggaaccgtagtgccgcaatccagtccctggttcatacacagatccgtcataaactgcgcgccatcttccgtccagccattcataaaatcggcatgggcggtataaagacttccccagcgctcttcccgggtttcgccatgcattaccgggtccatcgacaattccactttggacgtatccagcgaggagatctgcgggagtacccaggcgatgttcatattcaccgttgggattttgaccggatagtctgcggaacatttcccgtggtcggcatagatagcgttattgtggctatgggttggtttcaggttgacgccatcccaacagttggggaaagcgatcccgatattaaactggacggcatcgcccgctttacgcaggccgcatatttcgcctaccttgttggtgtaacctttgccgttggcacataaaaaggtgattgcggaactggggccagtaccgtgatgatcgcctgccagtaactccagcccggccgggaatggatggagcggatattgcgctacatttgtggattgataataggtcttttggtaggccggatttacgatttcaccatcaggtaatttcatggacggcgcccagtaagcggagctgtcggctttattatcacaggtggtatcgggttgcgcgcgcaacgtctggtaggtagagaccgcatcggtgtgggtgttgccaaaaaagtcatgccacatcgcctgattcgctttaccaaacatcataatcgcgtcatcgcccagcgtgtggtgatagccgcacacgacatgcgcctgaggaccggcatgggccgggaatgcgccagcggcaacgagcgtagccaggctgacggtaataaggttgagtttcatttttttgctgcccggttgaatagaagtgggagcagcaatagcagatcaaattgcggtgttacatctcattaattatcactttttgtcatttgccctgcatacaggggcgaatttgcagacgtactatttaaataattagccgaaactaccctcctcttgattatgtcaatttacaaaaagggtacgttagtgattaaaatcgggctttttgtgataaccctcactatttcattttgcctatgctaatggcgctcgccataaccgaataacgattctatcggacatcggctttatttttaagaaatgcgttacgacatcagtcgtgacgcgatctgctatggattttttatgagattactaaaacgcgttattgtggttgtactcttgggcgtgattttatttatggtcagggacgatatacgctatgtttatcaactgatcctcaaatatggtgataaaccctcggcgctggcactgagtagctataaagcggttattcagcaaaaaccagtcgcaggagttaagagtaacctttcaggtttgacctactccgccgaagacaggatgcttttcgccgttattaataatccccctgaactggtctggttaacgacagaagggcagctggtaggacggatgccgctgcagggcatccacgacccggagtctattgcatggagtgggggcaaccagttccagataggcagtgagaaagatggcgcggtctataaaacacaggtggatattcagcgcggcaccatgcagataatctccatggtgaagcttgagggctatgacaaagcaaaaaataaagggctggaaggtacggcatgggatgcgaaaaatgagagattatatgccgcaaaagaaagaaaacccattatgatcaaagaagtagagatgagcaaaaatggtatcaccagagcgttgccttctgccatcactgcgagtgtgagcgatgtctccggacttgaataccatgccccaacggattcgctgctggtgttgtcggacgagtcaaaaatgattcttgaggtcagttccgagtggcgggtgcgcgatcgattgttcctgacggcggagtggtcagggctcagagacgatatcccccagccagaagggattgccatggataatgaaaataatttgtatattgtgagtgaaccaaatctgttttataaattttcgtgtgatatacagaatgactaaaatctatttttactgtcacagtatgctaaaacagaacaaggttattaataccatgatttgacgattgtttgattcgttgattcattgttggggatatttatgttttacttacctcagtaacggattactttgtggtgtagcgtaacggtaattgtcctcctcatatttgcggcagcgtagtctgccgcttttttttataaattaactctctctgtaataattaacagacaatgaatattattctgttttttcagcaggcctccgaagagacctcgcatggtgatgtttagttatcaggcatgattttcttcatcaacacttaccgaatgccatgtcgcctcgctaagcgaaatcatttcatctacgccggaactcttgttaaccgggtttttcgtcggcgatgtgcctgtaaatgttccactggcggtatagtccgtatcgttgaccgtgaccttcacctgaatatcctgatgcgcctccacgactcccttaagggtgacggtgttatccagactgctaacagtcgatcccaacgttggttcggcggacggttgtgtatccatagtcagcttaattgttgcgtgagcttctaagcgacccgataaaggtcggtgtattgatgttagtgatattatcgcctccggcgccgatatcactattatcctccatggaacgtactggcggtgtagagtctatcgtcagccagccgatagacagcgaagaattatccatagcgtttgcggaacgatctctgaagatgatatccagagttgccttgcctaccactctaccaacattttaggaaaaattacgtaatatcgactgatatgtaaaactcattcagcatcaaatggattaattcaacatcagtagtaatatccatttttttataggctgatctcttttgtgttgaaatcgtttttatatttcgatctaataaatttgagcaacttttaacagataatcctgctgccacgtaataaataacttttttttcgctcaatgttaggtcgaattttttagcgagcaacagaatcccatctcttatattaatatgttttgctttgttcttatactgcattgtcagatatctcaattaacatattgatgacgagaggaagataaaaacgctaaaaattccgatggtgtagttttgaaatgttttttaaaaacgcatgtaaaataagaagcactatcataaccacacatataagccactcgagtaatattatattcactattgcgtagaagttttgtcgctttattcattcgcgcattaaggtaaacttcgctgaatgaggtgtgctcttgtttcaatttcctttttaatgtggaacaactcatatagagtgagtcagaaatatccttgagcgcccattttcgacttatgtcgcttataataatattatagatgttttcggccaatgtattttgcgatagttctctgaagagagcaaatgcttcaggttcatagatgaactctgaaagcagaaatcttattaaatattcctttttatcttgggataatttctggcttttatttgaagagtgtaagaggttgaatactcttgctacgcctgtttctattggcgctaacagatgttttgtcgtcggttttgttaatggggccgaaaagtctgcatgttcatacagaaaaaaattataagcattttttattgacgctgaatctaattcaattaaattataatttaactgttcatgagtctcttccatagtgatatgaatggtttgatctttagctaaaaatattaacattggccctgatgccgtaatatactccccggacgatgtcgtaattgaaattttacccgtggtgagcttgatgagtacggactgcagtaaatttaatccctgaagtgataaggatttcctctgccagttttgcgctgattgtaaacattcaatgctccccacctggacaggtgagggattaaatacttttagcatgataatttccttttattaaatgtgcgtgtaaatcaaaattattctgaaaaatatttcaaaagaaaactaatatatagctatataattatttgcgaacttaaggtatcaggtggcgatcttttcattttctatggaaaatgctattttatattgcatttctacatattatagtatcgttaaaaaactatgtcgcgtataaaaaaaagatggaaatttacaaggattggctcatgttattatcaatttatctctttaaaatttgaattaagtaataattgcctttaatcttttagagaatagctctttaatttcatggaggtagttagcatgaggtataagatctgatgttaatttgtgataaggtttatcctggatgtaaatattaacgctctcggccaggaaaggcatacaacgcggtaaatatatactgcggcgggtagacggtgtagcgatatccggaagtttgaggggaggggaagcattcaatcgtatggttggctttatgaaaaacggtgtaacacgttagtgaggttcttactgtgcgtatccgttaggtttatgctttctgattatataatgttgcgtgttttggcacggcagtattgaatcttttgctgcgtcggccccgaggaggaatcactcacagcgaatgccagcgcacagcctggtcctgaatctctaaatgagtagaaaacctttcggtttgatactccggttctattccttctaaatttatcgtaatgacatctgcgttacgcgtgttgtatgcttaatatccacagaagtacaagaggacaacactatgccagccgcaaacagtatggcgatgaaacgcgaaaccctgaacctgcgtatcaaacccgccgagcgcgatcttatcgatcgagcggcgaaagccagagggaaaaaccgcacagactttgtgctggaagctgcccgcgctgccgcagaggaagcgcttatcgaacaacgcatcattatggccgatccagaggcttatcaggagtttctcgttcgtttggatcaaacaccttcacctaatgccgcactgcgtaaaaccatgcagacccctgcgccgtgggagcaggaaaaatgatctccacccctgagccgcttcatgccggacatattcttactccgttttgctgcggtgtggattctatagataactggctggaacagcgggcgatgaaaaatcagaccactggcgcgtcccgtacctttgtgtgttgtggcagcgattcgaacgtactggcctattactcgctggcgtccagcgcggtcacgacgaatacctcccccggtcgctttcgtcgcaatatgcctgacccgattccggttgtggtattggggcgtctggcggtggataaatcgcttcatgggcagggcgtcgctcgggcgctggtacgcgacgcagggctgcgggttattcaggtggcggagactatcggcattcgtgggatgctggttcacgccctgtcggatgaagcgcgggaattttatcagcgggtggggtttgtaccgtcgccgatggatccgatgatgttgatggtgacgttgggggatttggtggagagtgtttaaactccagaacgcatcccttagcttctgatggccggaattcgctgtggatagtcagtgagccagaccggttttaccgcttcagccggacaacgacgtcatgacggtctggacggactgcaaacgggggaagggggcgttgaattcatgcgaatcggggaaaccaaaggcattctccacgcccggccgcccctacgcagttgcacttcctttcatttgctgtggccagtttgcgggaagactttcaccttcagtaattaagtttggggtgatcttctttactcaataaattatttttgtcgttcagctcctcacggacttttgccagtgacttctgaaaagccgggattgtttgcagtcttgcaaactctactgctcccacataacggccagcatcaacatcgctttgccagtgagcaccgcatatcactctgctttgcccgaactcccatccgcgtctggcgagctcctgcgcgcgttccggtctggcctcggataatactaatgccagaagtgtaccataagcagtatgcccggaagggtaagagccattttttcgcaaagtattctcatcttcaggacggcaggtggaatgattaaataagacaaaggggcgggtacgcatataatatttttttgccgaagcagtagcgtagtagccgcccattgtcagaagattctttaacatattccaggtttctggcgtatctttggggttaattttagcacccactactggcgagaatattctggctatattttccacgcttacatctgcatcctcagcagcttgtttccatcgcggggaaccctttatcgcatagcccttaaaataagcctccttatcatagcggtaagccggatcatcattacctggcggtggtggtaagtagaactgactgttcactgattcttcaggagaatgaaagggttgcactgtttctgctgatgtatatttagctacgatcagtggtagaaaaaatactaaataacgacttttcataaagactcactccggatcaggcaataataaacagatgtaatcctataatgatttattgcaatggttattcaacatacaggtaaaaaagcaggacgctgccctggcattatcgtctgtccataccggactgactgcagcggacaacagaacaataccggtacttccggctaacagcattttgtttaacttttgtccccgattattttttatctacgtgcctgactgacacgcattaggttaaaatctttccgtaataacacagtatgaataattattttaaagtatgtgctctgttaccccgataactaccatcagtcatgatgtgctgagtattaatttatgattatgaacaagagtcggaaacagtatttaagaataaagaaaccgaaaaagaaaaaatgctaaaattggcgaagggattattgttatcagtgatgaaaaagttcatggcggagatattggattcacttgtcggggttagcgaaccgtcagatggagtgatacgcgttattactggtaataatctccctgtagctaagtaagctttcctgacaggcgtgataaaagttccgcgcgataaaaaggcttgtacctggcattataagactcgcgtcctgcagaaacagggcagggaagggctcggcggttttaatcaggtatatctgttaaatcacatccttcaactggagcagcctttgttttaaccttcctctcatcgggccggaatgcttcgcctgcgttgatgtagcagaaaccggagaaatcacgccatccgatttcttgcaaatatcaggcgcaaaaaaacagacttgcgctaacaagtctgttctttaagagcctttcttttaacaacaagtaacagcgttacatcgtgtttttaccggcttgcctttgtgtccgtcagcattgcatcttgcaaatctgatcaaccggctttgaatagtggtgcggactcggagtcatattcacgattaacgtgctgtttgttattggttttgttggtatttcttacaaacagcgctcccacgaaggcccccataaaaaatcgctttatttttgtgatggttatcacgaaaaatcgtcgtttaagggtagggcttcgttatgtgtcctggtccatatataacgccagaatgagttggtttaaattttcaccaaaaagtcgcttctgaatcgacaaatagagtaatttttcaacccgtcgacttttcacccagaaatcacacaccgctcctcaccgtaccatagctgtgaacgctccaaatccacgaattccccctcatcgtcaataagctcctgaagggcgcttaatccttcttctgtttttcgggctgcaatatgcgattccagactgtcccaccacaactcggcgcaaccatcaaaatcgacgggcaatgaatttcttgtctgctgaagcgctgattgcgcggcactgttcgccaggggaactgtctggatgtacttacgaataccaagacgttctgagtgtttaaccaccagtgaggcatgttggttacgccagtaatgatcaaattcttctcgcgttaaatgggcacgccttttgacgcacatgactagttttaacatgttgctactcctgtcatttcgggagttcaaagcttacactctgacagcggtgtcagagtcaagaggacgttatgcagattggaaaactggcggcattgactggcgttagcatacggatgcttcggtactacgagagcgcaggtttgcttcatccttcgcgaaccgatacgggctatcgcagtttctcgtcagaagatgtggatattgtcagacggatacttattctaaatggtgcaggtttcacgttaccggttgtgtgtagtttgctgaactgcgtacatgcaggaacctcaccttgcgaggaactaaaagctaaagtgcgagaacaactggcacagatagaccgtcagtttgacgcgctctcggaaagccgcaatcttctcaataagtttcttaatgactagcccctgacaatttaccttctaacaccatgtgggaaatggattctactcctccgattgaacattgttcaaattcacatttgatattgaccctggcccaaagatgagcggctgatcgacgaagcgctgggcgttgcgccagagaaaatctggccttctcgttatagctagtcaggccagagatgggggctacggatttccattcccagaaaagcaaaaacccagccataggctgggttttctgaataagtggtgcccggactcggaatcgaaccaaggacacggggattttcaatcccctgctctaccgactgagctatccgggcaacggggcgcattaaaccgtaaaggggcgcggtcgtcaacggctttacacgaaaaaagtgataaaagcgcgctgactgcctgcttttcaggcaaaatgcataaaatcagtacccgtcaggtgagcgctccaccctgacggcactgtgcaaaacgcagaatatcttccgccaaccgctgagcggtatctacatcagcctgactgcggttgaccagcattcggctgagacaaccttccagcaccagctccatctgccttgcaaccatcgccggatcgtcaatttccagcgtggtcagtagctcatgggtaaaatcatgtgccgcgcgtttttgttgattagccagttggtgaataggatgggttgggtcgggataaaacgtacaggcggcaatgaacaagcaaccaggataacggttattactgacacattccgaaagcgcgctgtagcgtgccagtagcttttgttcagcagaaagcgtctcatcaagaagaagctggcgtcgccagatatctacctgctgactcagataacgtagcgcgtcatataaaatggcttctttatctggccagaaacgctgtaatgtgtcgagtgggcgatttacgcgctccgccaccatttccagcgtagtatcggctatcccttgcgtctccagtaatttcagggcttctcccagaatatcttcacgttgcacggtattctcctccgtctttgcttttgcaagtgtcgctcacggttggcgatcgtgcaaatgcgcgctaaaggtggcggcgtccataaagccggtgactcgcgattgcggctgttcctggccttgggtattaaagaacagaatggtgggcagcccgaggacttgcagatgctttaacagcgcgacatcctgcgcattgttagcggtgacgttagcctgcaagagcaccgtgtcgccgagcgcctgctggacccgcggatcgctgaaggtatacttttcaaactctttacaggccacgcaccagtcggcgtagaaatccagcataacgggtttgcctttggcctgcgccagcgcctgattgagttcatccacggtagaaatagccgtgaaattgaggtgcgctggagcttgcgcggatggcgatccgaacgcccaatcctgtagaggccgcacgctaatgagcgctgccgccagcaggataatctgtacgatacgcatccacgctcgtctggcctgaaggctggtgataaaggcccaaccaaagaaagcgacgcccagcagcgaccacagacgtaaaccccaagcctcgccaataatccgctccagtaaaaagaccggtaacgcgaggatcacgaaaccaaaagcggttttaacatgcgccatccacgggccgcttttcggtaacagacggttgccaaacacggtgaccagcattagcggcagacccatacctaatgcatacaaatacagcgtgccgccgcccagccacatgttgccgctctgagcgatataaagcagaatcgcgcttaacggcgctgtagtgcagggcgagcaaattaatccggcaatcgcccccataacaaaaacaccgccgggcgagccgccttgctgacgattactcattaatgtcagccgggtttgcagtgaggaggggagctgtagtgtgaacaggccaaacatcgacaacgcaagcagggtgaacacgatggcaaggccgattaacacataagggtgctgcagcgccgcctgaaactgtaatcccgccgcggcgacgaccagacccagtgcggtataggtcagcgccatcccttgtacatagataaaggccagcagcagtgcgcgccccgtcgacaaacgttgccttccccccaggacaataccggaaatcagcggatacatgggtaaaacgcagggcgtaaaggcgatgcctatgccgatcagcagcgcccagagcgcggaaaaaggtagctgggcggcgggttttgacgtctcactcgtctgggtgacagcaggcgtcggcgtggcgtctattgccgcggcgacttcacttagcggcaccgttttcgtttccggcggataacagaatcccgcatcggcgcacccctggtacgttaccgttaatgtcgcgccagccgccgcctggttaaccgttactggaacgtttagccgcttacggtagatttcgctttttccgtagaactcatcttcatgccagacgcctgtcgggagttggactgcggcgatatccgctttcgtcggcgtgatactgatttgtttacggtaaaggtagtaaccctcttttacctgccaggagagggtaagatcgtgttgattttgctgaaaatcaaaaacaaacgcccggtcggcagggacgaactgcgagcgacccggcgcgtcgaataatccggcgaaggcggatgtgctgcacagcagcaggatcagcgtaaagatgcgttgagccatgagaggtaatcagtatctccgtgagtaacaggtaaaaccagaagttcaggcgtttgatacgggtgatgagacttcaggcagtcgataagcgcttgctgatgtgaaacggtggtttttaagatcatttgaacttcatactcctgctccagtttgccttcccagtagtacagcgatgtcgcgccggggaggagggtggcgcaggcagccagtttttccgccagcactttggcggccagatcctgggcggtagcttcatccggggcggtacaaagcaccacaacggcctcggggatggaaatatcctgactcttaacatcaagcataaacacctcgaaagaacaaaaagacccgcaagtgaacggtcactatacaacggacgagggcaggatgttagtcaaagggcgggagaatgcggggcgtgatacgccccgcgggtgaaacacttacagcataaagctgcccagcaggaagccgaagcagacagccagaacgacgcccagggtgcctgggatgaagaacgggtggttaaagacgaatttaccgatacgggttgtaccggtgtcatccatctgtaccgctgcaaccagagtcgggtaggtcggcaaaatgaacaggccggaaacggcggcgaaggaagcgactgccgtcagcggagagacgttcagcgccagcgccatcggcatcagcgctttcgccgttgccgcctgagagtagagcagcgcggaagcaaagaagaagatgacggccagcagccacggatgaccctggatgacgctacccgcagtgtctttgatccagtcgatgttagcggatacgaaagtatcgcccagccacgccacgcccagaatacagatacaggcgctcatccctgctttaaaggtactggagttgaggatggcgtcagtttccactttacacaggatggtggtcagcgttgcgacgctcaacatgatgatcaaaatagcgttggtggtgttcatcagcggtttctcaaccaggccgaggctcggactgttaacaatcgcataaacaaccacgcagataacgcccagcaggaacagccagacggaattttttgccattggtttgatttcaatctgcttttcaccacgcagttcaatcagcccttcttccagacgcttgcggtaaatcgggtcgtccgacagtttggagttgaacagcatcgtgaccaggaaggacatcaccagcaccgccagcagcgtagaggggataaccacggacagcaggtgaatatagctaatgccatgaccttccataacagaagacatatacaccacggccgcagaaatcggcgaggcggtaatcgcaatctgcgcggataccacggcggtcgagagcggacggcaaggtttgattccctgctccttcgcgacttcagcaataaccggcagcgttgccagggaaatattcccggtaccagcaaaaatagtcaggaaataggtcacaatcggtgcgaggatagtgatgtatttcgggttcttacgcagcagtttttccgtctggtttaccaaataatccagaccgcccgcgacctgcatagcagagatcgcggcgataaccgccatgatgatggaaatgacatcgaatggaattgtccctggcttcacgccgatggcggcaagtaccagaacacccagcccacctgcgaatccaataccgatgcccccaagtctggcgcccaaaaagattgccagcaaaacaatgataagttcgacaactatcatattagccttccttgttgtttaacaagttgatattaaattgttgttatttggtaacttcttgtaagaaaaaaggcacgtcatcgtgacgtgcctctttggtactaccctgtacgattactgttcgctttcatcagtataacgtttagctttataagccgggtgcatcaagttctgtacggagaaaatatcgtccagctcggcttccgttaacaggccgcgctccagcacaacttcacgtacgctcttaccggtttcagcacagattttaccgacgatgtcgccgttgtggtggccgatgaacgggttgaggtaagtgacgataccgatggagttataaacgtacccttcgcacacttctttattcgcggtaatgccgttaacgcatttttctagcaggttgtagcacgcgttgctcagaatgtggatggattcgaacatcgcctgaccgataaccggctccataacgttcaactgcaactgaccggcttccgccgccatcgtaacggtggtgtcgttaccgatgactttaaagcatacctggtttacgacttccggtacaaccgggttcactttggctggcatgatggaagagcccgcctgcagttccggcaggttgatctcgttcaggccggcacgaggaccagaagagagcaagcgcaggtcgttacagattttggacatcttcactgccaaacgtttcagcgcgctgtgaaccataacatatgcgccacagtcagatgtcgcctcaatcagatcttcagccggaacacaggcgaaaccagtgacttcagccagttttttcaccgccagcggagagtattctttcggcgtgttcagaccagtaccgattgccgttgcgccaaggttgacttccagcagcagctcagcagtacgctcgatgcttttcacttcttctttcagcaggatgctgaacgcacggaattcttgaccaagcgtcatcggtacggcgtcctgcaactgggtacgacccattttcaggatgtcctggaattcaaccgctttacgttcgaaaccttcacgcaactggttgatggcatcgatcagtttgacgatagaggcgtaaaccgctacacggaagcctgtcggataggcgtcgttagtggattgacatttattcacgtggtcgttcgggttcaggtactgatattcacctttctgatgacccatcagttccagcccgatgttggccagcacttcgttggtattcatgttgacggaagtgcccgcgccgccctgatagacatctaccgggaactggtccatgcacttaccgttgttaaggacttcatcacatgcggcaatgatggcgttcgccacactcttaggaatggtttgcagctctttgttggccagcgccgccgctttttttaccataaccatgccacgcacaaattcagggatgtcgctgattttgttattgctaatgtagaagttttcaatcgctctcagagtgtgaacaccatagtaggcttcagctggaacttccctggtacccaacagatcttcttcgatacgaatgttgtttgacatgtgaaccttctttttcaagctgccaatgatttttactttaaaacacacaggatatatgtgatttcgaatgttttctgaccgacgattatcccctccatcggcctgataaacgagatcatatgctggttcagaattcctaccgtaatctggatcacttaaagtgtgggaatttaccccttatttattattttgtgaaataggtcaccgctttagtattactacctaaaataggtgtacaaaccacttgaaattttgctacgcaccaccatatcgaatcgatgcgaatcgcaaccccattcaaatggtcgtcgcagacggccatgacttacaggagagtcctttgcgctggataccctttttagctgtctttctctatgtttacattgagatttctatctttatccaggtcgcccatgtgcttggtgtcctgatgacgctaatcctggtgatttttacgtctgttatcggtatgtcgctggtacgtaaccagggttttaaaaactttttgctgatgcaacaaaaaatggcggccggtgagagcccggcggcagaaatgattaagagtgtatcgctgatcatcgctggcttactgctcctgttgccggggtttttcaccgattttctcggccttctccttttgttaccgccggtgcaaaaacatttgacgctgaagttgctgccgcatttacgtttttcccggatgccgggcggcgggtttagcgcgggtactggcggtggcgaaacatttgacggcgagtatcagcgtaaagatgacgatcgcgatcgtattgaacataaagacgatcgtcgggattaaaggtagagatgctggccggataagtcgcgtgaggcgttatccggccaacagatacgtcttacgccatgcgttttcgcttcggtaaaaacagccataatgctgccagcatgataatggcatataagcttttccaccccagcattaccagcaataacaggcacagtagacaacccgtcaccgccagtgcatagcagcgccctttcaatagtcgacagcccgccagcatacaaagcagatagagcataataaaaataccgttagcatagacgatcagcgcattgaggttaatcttcagggcgtagacgaccagggaactcacgcaacaacaggccagaataacgtttaacgcgtgcaagggaaggcgcccgggagagagttgagccagatagtgatcgggctgatattgcatttgcgtccatatcagacgcgcaaaactctgagcatacacattcaggctggcaaagcaggtgagataaccaataatgcaggctatccacaacgcctggataccgaagagatgaacaataataagcggtagcgatgctgttgccgctatcttgtcgctatagacgccaaaatgcagcaccacggcggtacaggtccaataaatggagccggccagcatcaggccaatgatcaatgcgcgcggaaaatcacgttcaggatttttaaattcagacgacaaatgcgtaaaagcctcaattcccacaaatccccagaacatgatcgccagggcggtacacagccgggaaaaggtgatttcgtttgcggctgggaaggtgatatctgcaggtttaatcgcgcctttccacagaatggcggcaataagcgcgataattaatccagcgataatggcttgcaggttggcgctggagctggcgccgcgcgatcccataaaccatagtaaacctagagtacccagctccccaaataagagctgttcgctttgccagccaaacagcgcctggccgaaacccaccgcaatatgcaaggctgcgggaaaactaacaggaatgactgataaaaacagccaactgatcacccgttgcagacgcgggccaaatgccatcccgacaaaatgcgctacgccgccagcgtgtggaaagtgacgccccagcacagcaaagacaatcgcaatagggaaaatcaaaataatgagcagcggccatgcccaaaggctgatgtcgcctgccgccagcgcagccagctccggaagcgcaaaaacgccagtccctaataatgatgtggttaacaagataacgccctgaaccaacccaagctctttttttagttcattcatcagctcattatccggcggcattgtaacgtcaggtgacgacagacatttttaagcgtatcacacacgccttttcttatagcaggatgttctaaaccttgggtaaacgtgagataagtagcgtttttaccgcttttttcgctcagaagaattttttttcatctccccccttgaaggggcaaaaccccatccccatctctctggtcaccagccgggaaaccgtttacgggccggcgtcacccataactgataatgactttctcaaaggagagctatcaatgagtattcgtccgttacatgatcgtgtgatcgtcaaacgtaaagaagttgagtctaaatctgctggcggcatcgtactgaccggttccgcagcgggtaaatcaactcgtggcgaaatcatcgctgtcggtaagggtcgcatcctggacaacggtactgtacagccgctggacgtgaaagttggcgacatcgttatttttaacgatggctacggtgtgaaatctgaaaagatcgacaatgaagaagtgttgatcatgtctgaaagcgacattctggcaattgttgaagcgtaatccgcgaacgacactgaacatacgaatttaagggaaagagaaaatggcagctaaagacgtaaaattcggtaacgacgctcgtgtgaaaatgctgcgcggcgtaaacgtactggcagatgcagtgaaagttaccctcggtccgaaaggccgtaacgtggttctggataaatctttcggtgcgccgactatcactaaagatggtgtttccgtagcgcgtgaaatcgaactggaagacaagtttgaaaacatgggcgcgcaaatggtgaaagaagttgcctctaaagcgaacgatgctgcaggcgacggcaccaccaccgcgaccgtactggcgcagtccatcattaccgaaggcttgaaagccgttgctgcgggcatgaacccgatggacctgaaacgtggtatcgacaaagcggttgctgcggcggttgaagagctgaaagccctgtccgtaccgtgctccgactctaaagcgattgctcaggtaggtactatctccgctaactccgacgaaaccgtaggtaaactgatcgcggaagcgatggataaagtcggtaaagaaggcgtcatcaccgttgaagacggtaccggtctgcaggacgaactggacgtggttgaaggtatgcagtttgaccgcggctacctgtctccttacttcatcaacaagccggaaactggcgcagtagagctggaaagcccgttcatcctgctggctgataagaaaatctccaacatccgcgaaatgctgccggttctggaagccgttgcaaaagcaggcaaaccgctgctgatcatcgctgaagatgttgaaggcgaagcgctggctaccctggttgttaacaccatgcgtggcatcgtgaaagtggctgctgttaaggcacctggcttcggcgatcgtcgtaaggcgatgctgcaggatatcgctaccctgaccggcggtaccgtaatctctgaagagatcggtatggagctggaaaaagcaaccctggaagacctgggtcaggcgaaacgtgttgtgatcaacaaagacaccaccaccatcatcgatggcgtgggtgaagaagctgccatccagggccgtgttgctcagatccgtcagcagattgaagaagcgacctccgactacgatcgtgaaaaactgcaggagcgcgtagcgaaactggcaggcggcgttgcggttatcaaagttggcgctgcgaccgaagttgaaatgaaagagaagaaagcccgcgttgaagatgccctgcacgcgacccgtgctgcggtagaagaaggcgtggttgctggtggtggcgttgcgctgatccgcgttgcttctaaaattgctgacctgaaaggccagaacgaagaccagaacgtgggtatcaaagttgcgctgcgcgcaatggaagctccgctgcgtcagatcgtgctgaactgcggcgaagagccgtctgttgtcgctaacaccgttaaaggcggcgacggtaactacggttacaacgcagcaactgaagaatacggcaacatgatcgatatgggtatcctggacccaaccaaagttacccgttctgcgctgcagtacgctgcttctgtggctggtctgatgatcactaccgagtgcatggtgaccgacctgccgaaaagcgatgctcctgatttaggcgctgctggcggcatgggtggtatgggtggtatgggcggcatgatgtaattgcccaccccctgcatccttcaggctgcagatgcgttggctaaccccagtcacttacttgagtaagtgactggggattaacaaactggccgccttcctgcaaccagaatgatttgggtgcttatctcccagaattgagaaacccccgggcagaaatgaccgggggtttttcttttagtcatctttttagtataagattcagatacggacaaaacgtccagctcattgattatggggaataacatgcacgtgaaatatttagcagggatcgttggcgccgcgctgctgatggcgggttgtagctccagcaacgaactcaccgctgccggccaaaatgtacgctttgtcgaagataagccgggcgcggaatgccagcttattggtacggcaactggtaaacagagtaactggttttcaggccagcacggcgaagagggtggctcaatgcgtggcgcagcgaacgatctgcgtaatcaggcagccgcgatgggtggaaacgtgctgtatggcgtaagtagtccgtcacagggcatgttgtccagttttgtcccgacggccagcgagatgaacggccaggtttataaatgtccgaactgatatgtctgaatcgtaacgccctctgaaagattcagagggcgatatggttagcgtttttcctgcgatgatgccatgcgtagattatgcaacgcgcgcatgcattgatcttgcgtcagacgcgctgctttaccggttccaagcgttctgacaaaaaccttacacggttttccttccagctttttaagacgcgggctgaaattcagcaagcggcgtgatattgcttcagcttctttagagcctgactgactacgggtcttaatgatggtgccgcaatcatgcgattgtcctgcctcatccgtataacgataaacgagcgctaaataatggttatacagattatgtttccagtcaggctggttataggtatcgaattcgatattaccgttttccaggcagtcagcatcgtataatggtaaaaagtccagcattgaagaaatacgcaatgcgagctcacgcatttcggcattattaatggcgtgaataatagccatcaccagaacttcaacctgccactcaccgacctgtaaatcaagatggctaccattgtgcagctttaacgtaaaggttaatactttttctgtattatcgctcaacgctaaagattcaacacgctgattaacatcggcgttttccagctcttcacggagtattgccggaatattctcatgcattttaagcacatgactgcttttagctttctggcgtttttcctgctcttgttccggaagcgagtgttgtagataaagccggtgttcaaggccgatcaacaagtctcgcagcgcgagcacaggaaagaaaagcagtgtttctttatttctcagtgacttcaccttaagcgccagcgcgataaacttatcattgtgacgaataacgccggtatttagtcccttaatcgttaaggccatgtcaattctccacaaatataaaataattaaatgttttactgcaatgtatttgatatataaattgtttatgccgtcctataaaaaggagaaccagtataattcgaaaatgcagtacacgctaagcgagtcctaaaacggactttattgaaaagagaggaccggaaaggtgtatttaacgaaggttagtttatcctcgccaaagggtgaggagaatcgcgggggagtctcctcgtaatattgcgcggtaatatttttcgtcgtccctgacgcgcccgcgaggattagcactgccgaagctgtaaatccagcggtgttttgctcggttcgccgccgatttcacgcgccagtcttggcaccatatagccggataccagcgtgagcagttcgcgcatgatttgccgggcttcgtcatcggtgaccataaaatgcgcggcgccctgcactttatccagcacatgcaggtaatagggcatcacgccggcgtcaaatagcgcgttgctcagattcgccagcgttcgcgcgttatcattcacgccacgcagcaggacgctctggttgagaagcgtgacgcccacgtggcgcagtttcttcatcgccaggccgaacgcctcgtccacttcattagcgtggttgatatggttcaccaacaaaatttgcagacgtgactggtcaaagcgggcgaccagttcgtcagtaatgcgtgccgggatgacgataggcaaccgactgtggatgcgtagccgcttgacgtgcttaatggcttccagttgcgtgagcagccagtccagctcatgatctttcgccatcagcggatcgccgccggaaaagatgatctcatccagttccgggtgtgcggcgatatactccagcgcgactgtccagttgcgcttattgccttgattctctgcatacgggaagtgacgacggaaacagtagcggcaatttaccgcacatccgccttttaccagcaatagcgcccggttttggtatttatgcaataatcctggcaccacgctgtgttgctcttccagcgggtcggtggagaaaccgggggcgacaataaattcatcccgggacgtcagcacttgacgtaaaagaggatcgtcagggttgcccttctccatgcgcgcaataaaagcgcgcggcacgcggagggcaaacaagcgcctggcgtcctgtcctgcccggaggttttcatcagcttcaatctgtaaaagatgcagcagttcgtcgggattggtcacaacatcggcaagttgcgctaaccaatcttctcgcaatggggtatttagggttacaatatgcgccattttgtggcttagctaccagttaacaatttcagagggccttatggcgacttactatagcaacgattttcgttccggtcttaaaatcatgttggatggcgaaccttatgcggttgaatccagtgaattcgtgaaaccgggtaaaggccaggcgtttgcccgcgttaagctgcgccgtctgctgaccggcacgcgcgttgagaaaaccttcaaatcgaccgattccgcagaaggcgcggatgtagtcgatatgaacctgacttacctgtacaacgacggtgagttctggcatttcatgaacaacgaaaccttcgagcagctgtctgcagatgccaaggctatcggcgacaacgcaaaatggctgttggatcaggcggaatgcatcgtgaccctgtggaacggtcagcctatctctgtcactccgccgaactttgttgaactggaaattgttgataccgacccaggtctgaagggcgataccgcaggtactggcggcaaaccagccacgctgtctactggcgcagtggttaaagttccgctgttcgtgcagattggcgaagtgatcaaagtcgatacccgttccggcgaatacgtatcccgcgtaaaataatttacgttatcgggaaaaatggtgcagcgtatgctgcgccatcctatttttcgcgcctcaatgatgaaacgctttatcggtcttgtcgcgctggttcttcttaccagcacattattaacggcatgtaataccgcccgcggcttcggcgaagatattcagcatctcggccacgccatctcccgtgcagccagctaatcgcttctcgtcttcctaaaattagtcgatcgcccatcattttctgggatgttgtctattattaagttgctatacacaaacaacattggctagaaaaggaagacattatggttaaaaagacaattgcagcgatcttttctgttttggtactttccactgtattaactgcttgtaataccacgcgcggcgtgggcgaggacatctcggacggtggtagtgcgatctctggcgctgcaaccagagctcagcagtaatcatcaacggtacggcatggcgtcgtaccgttaatcgattttctccggaagcataagaaagggagaataccggttatccatatgaagtttcatacggatattacgtttataggtgtaaaccgttttcccgtgaatgccaagcgcatacgcaatctctttattgctggtgccttccgtccacatcgcgagcactttttcctcctgcggagagagcaatggcgtggcgctttccggcgcttcctgcagtggatgagtatgtagcgctcctttaattcgttgtgcaagctcatgtaaaggcgtgtgtttagataacaccgcatgactggcatattgcggtctgtacggcatattccctgactgtaataataccaacggcgtcatcctgcaggcggcaaaaaatgcattgataggctgttcgggtaaggcatcgttgagaaaaccatataaatcagcgataaccaggtggggcttccattgcagaatatgttctttcgccagtataaggttattcatcccggataccagcagtgaagaactgagcacatcagtgtgattaagccaggcctccatgcccgtacgggtaaagtggcatcggtctatcactaaaattttcaacatagttttttgcacccggaagtagataaagcactttctttcccagaaggcgttccatcatagagaactcctgtgggcgctaaatgcgaaaactacgcggcttaaaagggccaattcccgcctttagacggaaaaaaataaaaaggttgaaattcattttctctcaggcaagaatggcttttcatccgtatacgttacaggacgacctgtaaacgctattctcaccggggacggccccattaattatctggagcctgctatgtcctggatcattctattaatcgctggtttacttgaagtggtatgggctgtcggcctgaagtatacccacggtttttctcgtctgacccccagtattatcaccattacggccatggttatcagtatggcgttactttcctgggcaatgaaaacgctgcctgttggaacggcgtacgccatctggaccggcatcggcgccgttggggcggcaatcaccggtatccttctgctgggcgagtctgcctcaccggcgcgtttgctcagtcttggcttgatcgtcgcgggtatcattgggctaaaactcagtgcgcattaattcgtcgctgatattgctacgaacctgattgttttacccaaattaatttattgacgtcaaacccctcccgggtcgcgacggccagcatttgctgttttatttcctcagaaagcgttggcgtgcgagagagtatccacagatagtcgcgatccgggccgcacaccagcgcatgacggtattcccggtcaagcgcaatcacgttatagctgccgtagaacgggccgaaaaaagagaccttgagcgcggcgcggtttggactaccggtaaaatacgctttgccttctgttttttgccacatttcccgatccgggttatagcctttattgatgacattaatcccgccatcgtcacgcagactataggtggccgtgacttgttccagtccacgttcaaatcgatgatcgaggcgtgcgatctcataccaggtgccgaggtaacgtttggcatcaaagttatttaccacggtaacgcctttaggcggggtaggcgaactacaggcgacaaccaaaaatgccgcagtaaccgcagcaacgacgggcagcaagcgcatagcgtttttccttccagtgttttttctaagtgtagaacctggcgggaaaatgagaggcaggaaaagaaaaaatgccctcttatcgggtagataagagggcgtcgtggcaacttagagagagataacgccaatcgccgtcacaacggtcaggattgccgccagaccgtagaagacccatttgcccgcgggcacgtggattttcaggtcatgcatcgcgtggtgcatacggtgtaggccacaccatagcggcagcacgatcatcaggaacagaaaaacgcgaccaatgaagctttgggcgaacgtcagtacgcgctcaaaactcagggcatcgcccggaaatagccccagcggcagcatgatgccaaccagtagcacgatcaccggcgcgatgatcgcgccccacataccgcctgcgccaaacagtccccagaatacgggttcatcagaacgttttgggtttggattaatcatccgggactccttaccagaacagggcaacatacagaatgactacggtgactaccgcagtgaccacccaaagccctttgatgattggctctggccccattttttcgtcttttacaatgatattggccgccttcggcgccagttcaaaccaggttttggtgtgcagcagcgcggccgccagggtgatcaggtttaagatcaccaccaccgggttttgtaaaaagccgacgaatcccatccaggattccgcgccgtgtttgagcgcaaacagaccgaaaatcagttcaatactgaaccagactgccggcaccgctgtgccttcgcgcagcatataaaagcgataaaacggcagttttttccaccaggtggacgtcatcggccgcacatagggtttgcgtttagtcgtcatgttgcactccttagcgtggtttcagggtggcgataagaaagtctttcgagctttccactttaccctgctgaatggccgcagccggatcgacatgttttggacagacttcggagcagtagcccacgaaagtacaggtccatacgccgttcggactgttcaactgcgccatacgctccttcttaccgtgatcgcggctatcttcgttatagcgatgcgccagcgtaatcgcagccggtccgataaattcaggattcagaccgaactgcgggcacgcggcgtagcacagaccacagttgatgcaaccggagaactggtgatacttcgccatttgcgccggggtctggacattcggcccctgatctggcgtgcgagagttgccaataatgtacggtttgatcgcttccaggctttcgataaagtgcgtcatatcgacaaccagatcgcgttcaatcgggaagttcgccagcgcttccaccttcataccgttggtgtaatcgcgcaggaaggttttacacgccagtttagggacgttgttgaccatcatgccgcaggagccgcagatcgccatacggcaggaccagcggtagctcaggtctggcgacaggttatctttgatgtagcccaacgcgtccagtagcgatgttgtttcatcataaggaacttcatagaaagcactgtgcggcgcggtatcggtttccgggttatagcgcaccacctcaactttcaggtttttcatctcagccattcgccttctccttcttatcggctgcttccgcttcaccgccgtaaacacgtttggctggcggcagggtggtgattttcacgtcgctgtattccagacgggtcgtgccatcagcatcgcggaaggcgagggtgtgcttgaggaagttcacatcgtcgcgctcggtacagccttcatccagacgctgatgcgcgccgcgggactctttacgcgccagcgcagagtgcgccatacattccgccacgttcagaccatgacccagttcgatggtatacagcaggtcagtgttgaacacgctggaggtatcggagatacgtacgcgcttgaaacgttcctgaagctcggccagtttatcaacggttttctgcatcagttccggggtacggtaaataccgcaaccttcttccatagacagacccatctcatcgcggatcttcgaccagttttcgttgccttcctggttcaccagatttttcagacgctgttcaatatcggcaacctgggcgtcgagcgcggcgctatttgcggcgcctgccgtagcagcgcgttccattgcttgttcgccagccagacgaccaaacaccaccagttccgccagtgagttggaaccgaggcggttcgcgccatgcaggccaacagaggagcattcgccaacggcaaacagccctttgacacggctttcacagttctggtcggtttcaatgccgcccatggtgtagtgcgcggtcggacgtactggaatcggttctttaaccggatcgacgccgacataggctttcgccagttcgcaaatgaacggcagacgttcatgcagtttcttctcgccgagatgacgcaggtcgaggtgaaccacatcgccgcgcggcgtggagatggtgttgcctttacgccattcgtgccagaaagcctgggatactttgtcacgtggccccagttccatatatttgtttttcggctcgcccagcggcgtttcggggcccatgccgtagtcttgcaggtaacgatagccatttttattgaccagaataccgccttcgccgcggcaaccttcagtcatcaggataccggaacctggcaggccggtcgggtgatactgaacgaattccatatcacgcagcggaacgccatggctcagcgccatgcccatcccgtcgccggtgacgatgccgccgttggtgttatagcggtatacgcggcctgcgccgcctgtcgccatgaccacggcgttggcacggatttgcaccagcgtgccttccatcatgttcattgccaccaggccgcgcgcatggttgtcatcaaccagaatatccagcacgaaatgttcgtcaaagcgctggatttgtgggaactgcagggaagtctggaacagggtatgcagcatatggaagccggttttatccgcggcgaaccaggtacgctcgattttcataccaccgaagcgacgcacgttaacgctaccgtccggacggcggctccacgggcagccccattgctccagctgcgtcatctcagtgggacaatggtggacaaagtaatccacgacatcctgctcacacagccagtctccgcctgctaccgtatcgtgaaaatggtagtcaaagctgtcatgatcctgggcgacagcggctgaacccccttcggcagcgacggtgtggctgcgcatcgggtacacttttgagatcagtgcgattttagcattgggattcgcctgtgcggcagcaattgcagcacgtaatcccgcgccaccggcgcctataatggcaagatcggcttgaaaggtttgcacgacattcctccagattattgtaatttcaccctcgcgcagccagataaagcctctgggttctgcgaagtatgaatgcgtttccactgctcctttatgggtacaacagtatagtctcagggatgtgagggaaatttgacgtgttcgatttttttagcgtatcagagggatgaattatcattgattttgattaatttaattactaaaccatctgaaatcactttttttaccctccagaaggcgcccgatacgcctgcgcaaaatttgtttcgcccgcgcgttgcgagtagacttcgtgaccttgtcttaaactggagaaagaatcatgagcgaaacggcaacctggcagccgagcgcgtccatccccaatttattaaaacgtgcggcgattatggcggaaatccgtcgtttctttgccgatcgtggagtgcttgaggttgagacgccctgcatgagtcaggcgacggtcacagacattcatctgttcccgttcgaaacgcgtttcgtcggacctggccattcccaggggatcaacctctatttaatgaccagtccggaataccatatgaaacgcctgctggcggcagggtgcggcccggttttccagctatgccgcagtttccgtaatgaagagatgggacgacatcataatccggaattcactatgctggagtggtatcgcccgcattacgatatgtaccgcctgatgaatgaagtggatgatttgcttcagcaagtgctggattgtcaacctgcggaaagtctctcctatcaacaggcgtttcagcgccatctggagattgacccgttatcagcagataaaacgcaactgcgtgaggcggcggcaaagcttgatttaagcaatatcgccgatacggaagaagaccgtgatacgttgctgcaactgttgttcacgatgggggttgagccgcatataggtaaagaaaagccgacctttatttatcactttccggcaagtcaggcatcgctggcacaaatcagtaccgaggatcatcgcgtcgccgagcgctttgaggtgtactacaaaggtattgagctggcgaatggtttccacgaactgacggacgcacgtgagcaacaacagcgctttgaacaggacaatcgtaagcgcgccgctcgcggtctgccgcagcagccgattgaccaaaatctactggatgcgctggccgccggtctaccggattgttccggcgtggcgctgggtgttgatcgtctggtgatgctggcgctgggagcagaaagcctggcggacgtgattgcttttacggtcgatcgggcgtaaatctgaaattcactctttcgcgagataaaatggcgcaataagcgccattttgtagcatattttttcaattatcctctgtttgccacaacataaggctggaactttgatgccatttaggtatcaatcctgtgttgatttttttatcgctgaccttcgtaaaaaagaaggcggcgtcaatcggtgagcggcgtctggcaaacgcgctcgagcgtaagggatggttgaatgacccacacgataaaaaagatgagccttattgggcttatcctgatgatttttacttctgtttttggttttgcgaatagcccgtcggcgttttatttaatggggtatagcgcaatcccatggtatatattttctgccttgctgttttttattccattcgccttaatgatggctgaaatgggttccgcttatcgcaaagaagagggcgggatctattcgtggatgaataatagcgtggggccacgttacgcgtttattggcacgtttatgtggttttcatcgtatgtcatatggatggtaagtacggcggcaaaaatttgggtaccgttttctacttttgtttttggcgccgatatgacgcagcactggcgtattgcagggcttgagcctacgcaggttgtcgggctgctcgccgtcggctggatgattctggtgacgtgtgtcgccgccagagggatcaataaaattgcgcgaattacggcggtcggaggtattgccgtaatgtgtcttaatttagttttattgttagtgagtgtcgctattttgttattaaatggtgggcattttgcacaagaaattaattttacctcgtcaccgaatccgggttatcactccggcctggcaatgttgtcatttgtggtatttgctatttttgcgtacggcggtattgaggctgtcggcggactggtggataaaaccgagaaaccggaaaagaattttgcgaaaggtattgttttcgcggctattgtgatttcaattggttattctttggcgatctttttatggggcgtcagcactaactggcaacagatattaagtaatagcgccgttaacttagggaatatcacctacattctgatgtcgagtttaggcacgacattaggtaacgcgttaaacctttctccggaagcagcgatgacggtgggcgtctggtttgcgcgtatcaccggcctttctatgtttctggcttataccggcgcgttttttacgttgagctattcaccgctgaaagccattattcaggggacgccaaaagcgttgtggcccgcgccgatgacgacactgaacgctaacggtatgccggcgaccgctatgtggctacagtgcgtgctggtgagtctgtttattttgctggtctcttttggcggtgacaccgcatcggcgttttataacaaactcacgctgatggcgaacgtctcaatgaccttgccatacctgttccttgcgctggcatttcccttctttaaagcgcgtcaggatctggagcggccatttgttctctttaaaaccaaagcctctaccctggtcgcgacgggtgttgtggtgctggtggtgacgtttgccaacgtctttaccatcatccagccagtgattgaagctggggactgggacagcgccttgtggatgatcggcggcccgatcttcttctcgctgctggcgatggcgatttatcagaattacagtagccgcatgagcgccgatccggagtgggcggcggagtaatctttgtccggatagcgttagctcatcggctttatgaaaaggatatttataatgagtccgaaaatgtttgcgttgtgcgctatctggattttactggctatcccactcatcgctgtattttcagtcctggataaagagtggatgattggcgagagtgggataaccaacatttgtgatgtgatgagaactgtcgaaaatgatgattccagaagttttggcgcgatgatgacgctgcccctgtttttcccatttttttacgttactgtgtataagaaaatacgtagttggtttttgtactgtgtcgcgttggtgatatttgcttactggtcctggcaattcttcctgcgctatcagttttgtgtgtgatctatgctaaaagacctgataagcctatgtcatcgagtcttttagcgtcatccggcgccattgcgtttacaaactccccgccgggcggctggttttacccgctgacgttaacgttctccccgtttgtttaccgccgaggctctccagacgcatctggaacggcgggaacggcatatcaataccgtgttcgcggaagccagccagaatcaattggtggatctcatggcgtaatggcatacggtgtcccatttccgcggcatagatacgcagttcgaaaatctgaataccctgctggagatccaccagaaagatttcaggcggcgggttatcaagcaccaaagaacagcgctgcgccgccgtcagcagaatttgcgtcacctcttcgctattggcatccgctggcgccgggatggttaacaccacgcgcgtaacggagtcagacagcgaccagttgataaactgttcggtgataaaggctttattcggcacgataatctctttacgatcccagtcactgatagtggtggcgcgggtattgattttggtcacgctgccggtgagatcgcgaatggtcaccgtatcgccgatacgaatcggcttttcaaacaaaataatcaggccggagataaagttagcgaaaatttcttgcaggccaaaaccaagcccaacgccgagcgcggccaccagccattgtagcttcgaccactcaatgccgatcatcgagaaaccgaccagcccgccaatcagcattaacagatatttggtgatggtcgtgatggcgtaaccggtaccaggcgttaaatcgagatgctgtaataacgccagttccagcagcgcaggcagattacgcaccaactgcgtggtgatgataaagaccagaatcgcaatgagcaccgcccccagagtaattggctccaagctttccacgccttgcaccgtagaggtgacatcccacagcgaaatattctccaggaagccgaatgccgagtggatttccgaccacagtacaattaccgatagcagggcgataagcatcagaattgagcggaccagacgcagcgactgggcgctaatagcgtcaagatcgatttcactttcatcgatgtcgaccgcgccttccaggctggaggagtgcgccggttcttcttcgccgcgcgcgcgctgcgccagcatttccgcccgacgatgtttggcgcggtcaaaagccagtcggcgtcgttggatcagcatccagcggcgaatgacatgataaataaccagcaacaggaaccagatggcgaccgaggtttccagtctcgccagtagcgcctgcgctgtggccagataacccaccgccgccgccagaatcgcgataagcggcgcgcccatcaacatattccacagcaggctgttgaccatgttgtcgccgttgccttctttatcaagatagagcggaatgcccgcttttttcagactcagcgtgaccagcgccagcgcgccgcatatcaggatgaagcaaaggcggcccaacgagccggaaaactcccgatcgttaagattatcaaacatgatcactgccataatgagcggcacgatcagcccaatgctcatcaggtagtagcgcatcgctttcgctacccggtttcgcggccagccgaaatgcgccacaaacagaccattagggcgggcaaaagcggcgcaaatcatgactacccacaacagcggtactgtcgccgtcacgccatcgccgatggcgacggccagcggatacggccaggcttcctgtagaccatagccgagcgtcgcccacaagacgggcagcggcgaggcgaccagaatcgaccagaacaccgttcgcagcgtcagcgagaagtgatcctgggtgactttcccgacgcgcgaggccgagcgttcaaggaaccggttgaagtgttgacgtgaatagaggctaaacccgaccagcgccagcgcgccgaataacggcagtagcgtctctttgctggtcagcatcatgatgctggctttacctaactgattaaacgtatctaatgagataagccgacgtaaatcctgaaccaaatcaacaggccaggagagcgatagcgggctaacgtcagcggtccagaacagataacggtgggtcgcttcattaacctctttaagcgcatcctccagttggctgttggagactttcagtttggtcagctccaggatcagcgtgtcgccgccctgtaacaacgagttgagcagctcgcgctgagtgcgaagctgggcgtcaagaatctggttttgctcggcggtcagcggctgtccattggcctgacgtatttgccgtagctgcggctgcttattgagtaactcttcatagcgcatacggtggacgcgtagctgcgccatttccgtatcaagctgctgcggcttaggcatctctggcagacgggcgacctgcgcgcgcagcgcttcgccaagcatgttggacacgccaagccattgcgactgctcccgcagcgtattgagcgcctgacgcacctgtaacgtttggctggtggcctgtcgctgctgcgaggcgaccagatccatccgctgcgcttgttgattaagcgcctgtgacagctcgcggttgactttaaattgttcgacgatgccttccggcaaaccggcgctgttttccgccagcagctcagtactttccagcgcgcgttccgcttcacgttgacgcaggctgttgagctgattgcgcagcgcctgaagatacgcatccaattgctgactctgtttttccgccagctcggaacgcagacgagccagttcctgccggttgttggcggacagttgcgccaactccagttcgtcgactaacgcttttagtttggcggactccgcctgcatactgagactttgcgcctggctaagcgcggcacttccgcctgcggcgccgagtcgtcgctcaatctcattaagctggcggcgggcgtcgttttgctgttggggaagctggctgagcgagtcggcgatctccctgacgcgctcctgctcctgttgcgcctcgcgggttttatctagtagctggctgctaacctgcaagatctcctgatttaacgcttcggtggacatctctggcggtacgctgcgaggttcatcgcgcagattattcaactgggcgcgcaaggtggcggatagcttagggaaattatcaataacgtgttgatattgtttcgcgcgctcaagcgagccttttcgctcttcaagcgcgtttaacgcagtctggagcgcctcaacggcttccggctgagcgggcttcgccgcttttgcctgctccagttcctgcgtgatttgtttggcgtcgggggccgttgcggcgaacgcccccgtgctgaggcaccaggccatcagaaaagcgataatcaggcgcacgtcagcattctctcttgattaggtgtcgtcttttttattgtcaaccagcgggctggcgtcgtgttcggctttaatttcttctgccggcagcggagcaggttctacctccggcgcgacgaatgtttcggtcgacgtcgccagcggttggccaattttggtaacggacaggcttgccagcgacgcgatcagattcacttttcccggcgcaaataagttgatgaccgtggaacccagtttaaagcgtcccatctcctggcctttcaacagggcgacagacccttcatgttcgccttctggccaggtccagcgcttgatgatgccttcgcgcggcggggtaatggtccccgcccagacggtttcgatactgccgacaatagttgcgccgaccagaatctgcgccatagggccgaactcggtatcaaacaggcagataacgcgctcgttgcgggcaaacaggttggggacgttttgcgcggtcagatggttaacggagaacagatcgcccggtacgtagatcatttcacgcaggatgccgttgcatggcatatgcacgcgatggtagtcgcgaggggagaggtaagtggtcacaaacgtgccgttgcggaacttatccgccatcaggtagttacccgccagcaacgcctcaaggctgtaattatggcctttggcctgcaaaattttatcttcttcgatacgacccaactggcttatcacgccgtcggcaggcatcaccaggatgttaggatcggtattgagcggacgcacgtcatcacgcagcggacgaacaaagaaatcattgaacgtacgatagctggcggtatccggtttttgcgcctcggtcatatcgactttgtaatactttacgaagagatcgataaccagttttgtcagccatcctgctcgtttgcttgcgccccagcccgccaggcgagtgagccatagtttcggcagaatgtattgtagcgaaagtttaaatgagtttaacaaggtagcctccaggccattgttgttcctgaaccggcagttataccggtatcctgaaaaaaggggacgattctaacgacgcctagcgtatctgtcagtcgtccgtatcagaaaagtttttacgcgtttttacctgcgccatactttcaagaattcggtgataattttcgaaacgggtttccgcaatagcgccgttctctaccgcttcgcgaatggcgcagcctggatcggcgtcatgcttgcagtcccggtatttgcaatgtcccaaatagtcatgaaattcgacaaagccctgggtgatttgttccggctccagatgccataagccgaactcgcgcacgccgggggaatcaatgacatcgccgccatgcgggaaatgatacagacgagcagcggtagtggtatgttgacccagaccggagacattcgacacatcgttcgtcagaatctcgttctgtaagccgagcagagcgtttagcagactggattttccgacgccggactgcccagcaaaaatactgatgcgaccggttaacgcctcttccagcggtttcagaccatcctgcgtatggctggagaccatcagcacgcgatagccgatattgcggtagatatccatctgctcattaacgaagtccataccttcgtcgtccagcagatcaattttattgagtacgataagcggctcaacctgtagggtttcacagccgaccagatagcgatcgatgatattcagcgacagctccggcaaaatcgcggagacgataacgatttggtcaatgttggcggcaataggcttcacgccgtcgtagaagtccgggcgcgtcaataccgaggtgcgctcatgcaccgcttcaacgatgccttttacgttgacgccctctgcggcggctttgcccggacgccagacgacgcgatcgcccgtcaccagcgaacggatagtgcggcggatattgcaacggtgaacctcgccgtcagcagactccacatcggcatgcataccaaaacggctaatgacgataccttctgcaggctcgccaaacaggttgtcatcgtagtcggctttctccgcggacgtttttaaacgacgctggtgattggcgttcacacggcgctgctggcctttggagagtttatttttgctcaatcgtactggctcctggtcgcccatagtgggcaaaacatctatgatacacgcaattgtagatgaatatagtcacagtgaatgtgacctctgaagggtggaaaatagcatgagtgccgatgaaaacaacctgatttggatcgatctggagatgacaggtctggaccccgagcgcgatcgcattattgagatagccacactggtgacggatgccagcctgaacattctggcggaagggccgacgattgcggtacatcaatccgatgcgcaactggcgttaatggatgactggaacgtgcgcacccataccggtagcggcctggtagatcgcgttaaggcaagtacgatgggcgaacgagatgctgaactggcgacgattgaatttctgaaaacgtgggtgcctgcgggtaagtcgccgatttgcggtaacagcatcggtcaggatcgtcgttttctgtttaaatatatgccggaactggaggcctacttccactatcgctatctggatgtcagtacgctcaaggaactggcgcgccgctggaagccggagattctggccggctttaccaagcagggcacgcaccaggcgatggatgatattcgcgagtcggtggcggagctggcttactaccgcgagcatttcattaagctgtgaggcgtaacatgccggatggcaacgccagagcgtctcatccggcagctctccccacactgaattactgcgtaaaccatttctcctgcatctgcgcatattccggcgacgctttcaccttgtcgagcgcggcattaatttcttgcaatagcgcgtcgttgtctttgcgtaccgcaatgcctaacccttttccgtagtagtcaggatcgctggcgcgttcatccatgatggcgtaatccggattgttttttagccacttaccaatcgcggcgacatcgccaaacacgccctcaagacggttgtttttcagatcggtaaaggcgtttagatagctgtcataggcgacaggcgtgatagcttgttgtttatcctgcaaatagcgctgatgcgttgtaccgttttccagaccgacttttttgcctttcagatcggcaaaagtgtgataagcccctttacgcgtgacgactaccgccgatagaccttcgtaatagggttggctaaaggagacctgctgctcacgtttgggcgtcatatccataccggcgatcaccgcatcaaactttttgaagcgtaggctggggatcagactatcaaagctctggttagtgaatgagcactccgcttgcatctctttgcagaccgcgttggcgacatcaatatcgaaaccaacaattttattatcggcatcgacaaactcatagggcgcataggtggcggaggtgccaaaatgtaatgttctggcggaaacggaagcggcgtgaacggagaggctggctaacagcatgacaataagtttttttttcatcttgatccctgatatcaattggatgttgtggtcaccgtgctattctttttttggcgcagggtgctattctgattctgtgcctttaggcgtggcgtgaaaagttttttgttgcatagcgcacgctttgctcgttttttgtcttgtttggtgatttaatcagcattcaaacaaaaatcgcgaaaaaatgcgttcaggggcttgcagctaaatggatttctcgtataatgcgcctcccgtaacgacgcagaaatgcgaattacgacagcaacaaatttgcgggaatagctcagttggtagagcacgaccttgccaaggtcggggtcgcgagttcgagtctcgtttcccgctccaaaatttgaaagtacttgttaagtacaaaccaccaatcgcaggatttcgaattgcgacaaggcggcaactgaacgagtcctcaggagcttactgaagtaagtgactcaggcgagtgaaggcagccaacgcagtagcggttcgaaagacgaagattatgcgggaatagctcagttggtagagcacgaccttgccaaggtcggggtcgcgagttcgagtctcgtttcccgctccaaaatttgaaagtgcttgttaagcacagaccaccaatcgcaggatttcgaattgcgacaaggcggcaactgaatgagttctcaggagcttactgaagtaagtgactcaggcgagtgaaggcagccaacgcagtagcggttcgaaagacgaagattatgcgggaatagctcagttggtagagcacgaccttgccaaggtcggggtcgcgagttcgagtctcgtttcccgctccaattcttatctacagtaaaattatccacaacgaatatcgcgttggggcacgttttgttccgctttcgtcagatccttgtaaacagacttatccacagggcggcccattactcctggaatgcaaaaaattatacctgacgcgtagaatttctataatttactgaaaaatatagaaaaaataagatttcaaaacgttagttttattgactattccttttttccctcttgaatcgcaatgtgtttttatttttatacacagcctgtgaataattcaggcatcgcgcaccagccctttttcaatcaccctgaccagacgctgttttttcggtagctgcacttcaatgatgcaggcgttgcgcttttcaatttgttgcgcaatcgcccattcgatatgctcatcgagaagtggatgctcacccttgcggctttccagcgccgtaatgacggcattactccacggcgcattccccagcgcgacggcaacattgcgcagccagcgtaaatgaccaatgcgccgaatcgcagaaccttcagtgactttcagaaactgcgcttcgctccagctaaacaactcaagcaaatctggattatgcagcgccttgcgtgggctaaaatctgcttcgtcggtcaactgagagtaacgattccacggacagataagctggcagtcatcgcagccgtaaatacggttacctatcagtgggcgaaatgcttccggaatagcgccttccagctcaatggtgagataagaaatacagcgccgcgcgtccaccgtatacggttcgacgatcgccccggtcgggcaaatggtcatacaggcgacgcatttaccgcaaccttcctcgaccggctggtcgaccggcagcggtaaatcaatcagcaattcccccaggaaaaagaatgagcccgcctcccgattaaggataagtgagtgcttacccgtccagccaagtccggctttttccgctaatgggcgttcaagaataggcgcagagtcgacaaacggtctaaaattcagcgaaccgcagtactgctggatctgctcgcccagttttttaaggcggctgcgtaatagcttgtgataatcacgccccagcgcatatcggctaacgtagcccagcgtgggatccttcaacgtactggcaaacgcggcgttggcgggcagatagttcatgcgcacgctgatgacacgtagcgtaccgggtaagagttcatgaggccgggcgcgcatcataccgtggcgcgccatccatgccatctcgccgtggtattgtttgtccagccacgcctgcagcgcaggttcggatgcgcgcagatcggtatcagtaataccgacctgctgaaagcccagctccagcccccactgcttaatattttgcgctaactgattgagatcgaggggctttgacatgatggaccataacatgaagaaaaaccctgtaagtataccacactccatttggcccgccgatgacatcaaacggctggaacgcgatgcggcggatgccttcggactcacactctatgaattgatgctgcgcgctggcgacgcggcatttcgggtagcccgtgacagttatcctgacacccgacactggctggtgttgtgtggtcatggcaacaacggcggcgatggttacgtcgtggcgcgactagcgcaagcggcgggcattagcgtaacgttgctggcgcaggagagcgacaaaccgttgcctgaagaagcggcgcaggcgcgcgatgcctggctgaatgccggcggcatcatccatgctgccgatattatctggccggaagcgacggatctgattatcgacgcgctgcttggcaccggcatagcccaggcaccgcgcgacccggtagccggtctgattgaacaggcgaacgcccatcctgcgccggttgtcgccgtcgatatcccgtcaggtctgctggcgcaaacgggcgccacgcctggcgcggtgataagcgccgcgcatacggtcacgtttatcgccctgaaaccaggcctgctgaccggcaaagcgcgtgacgttaccggcatattgcattatgacgcgttgggactggaaggctggctggcgagccagacgccgccgctccggcgttttgacgcgacgcagttggggcaatggctaacgccgcgtcgaccgacctcgcataagggcgatcatggtcgtctggcgattattggcggcgaccagggaacagcgggcgcaattcggatggctggcgaggcggcgctgcgtacgggggctgggttggtcagagttctgactcgcggtgaaaacatcgcgccgttgctgacggcccgcccggaactgatggtacatgaactcacgcctcagtcgctggaagagagcctgacctgggctgacgttgtggtgatcggcccggggcttggacagcaggaatggggcaaaaaagccttacagaaagtagaaaacgtccgtaaacctatgctgtgggatgcggatgcgttgaacctactggcaatcaatcctgataaacgtcacaatcgcgtgattacgccgcatccgggagaggcggcccgcctgttaggatgttctgtggcagaaattgaaagtgatcgcttactttcagcacagcgtctggtaaaacggtatggaggcgtggtcgtgttaaaaggcgcaggaacgattatcgccgctgaacaccaccctctggctatcattgacgctggtaatgcggggatggcgagcggcgggatgggcgatgtcctgtccggcatcatcggtgcattgctcggacagaagtttaccccgtatgatgcggcatgtgtgggatgtgtggctcacggcgcggcggcggacttactggcagcgcgttatggcgctcgcggcatgttggcgaccgatctttttactacgctgcggcgtattgttaaccctgatgtgattgacgtaaaccatgatgaatcgagtaattccgctacctgacgaacaggcgacgctagacctggggcaacgggtagccaacgcctgcgatggcgcgaccgttatttatctgtatggcgatttaggtgccggtaaaacgacgtttagccggggatttttacaggcgttaggccataacggtaatgtaaaaagccccacctatacgctggtagagccttatgcgattgataacatgatggtatatcacttcgacttataccgtcttgcggacccggaggagctggagtttatgggcattcgcgattatttcgccaacgacgccatttgtctggttgagtggccgcaacaaggtaaaggcgttctccccgacccggacgtcgaaatccatattgattaccaggcgcaggggcgtgaggctcgcgtaagcgcggtatcctcatcgggtcattcgttactggcgcgtttagccgattagctataaaggtggcgggatgatttatcgcatcaaaaatgccgtaatagcagccttaatcctgctgtgcgcgcaggcgggcgccgccagtctctctgatattcaggtgtccaacggcgagcagcaggcgcgcattacgctgagttttatcggcgagccggaatatgcttactcacaggacggtaaacggactgtggcgctggatatcaggcagaccggcgtgattcaggggctgccgcttcagtttagcggtaacaatctggtaaaaacgatccgtgctggaacgccgaaagatgcgcaatctttacggttgcttgtcgatctgacggaaaatggtaaaaccgaggcggtgaagcggcaaaacggcggcaactatacggtcattttcaccattaatgccgatgttccgccgccaccgccgcctgtcgtcgcgaaacgggttgaaagcgcgcctcgcccgacggagccggcccgtaatccgtttaaatcttctgatgatcgcctgaccggcgtaaccagcagcaataccgttacgcggcctgcggcgcgcgcgtcggcaggcgctggcgataaagtggtgattgctattgatgccggacatggaggccaggaccccggcgcgataggcccgggcggtacgcgcgagaaaaatgtcaccatcgccatcgcgcgtaagttacgcacattactgaataacgatccgatgtttaaaggcgtgctgacgcgtgacggcgactattttatttcggtgatggggcggtctgatgtggcgcgtaagcaaaacgccaactttcttgtctctattcatgcggatgccgcgccaaatcgcgacgccaccggcgcctccgtctgggtattgtccaatcgtcgcgcgaacagcgaaatggcaaactggcttgagcagcatgagaagcaatccgaactgttaggcggcgctggcgatgtgctggcgaacagtcagtcagacccttacctgagccaggcggtactggatttgcaattcggtcattcgcagcgggtagggtatgatgtggcgacgaacgtactaagccaactcgacggcgtggggtcgctgcataaacgccgcccggaacacgctagcctgggcgtgttgcgttcgccggatatcccgtccattttggtggagacgggctttatcagtaatcacggcgaagagcgattgctggcgagcgaccgctatcagcagcagattgctgacgctatataccgggggttgcgtaagtactttgcagcgcatccgatccagtctgcgccgcagggcggcccaggccagacggccagtaccaaccagcctggcgccataaccgccgcgaattaaggagatttcatgccgattcaggttctgccgccgcagcttgcgaaccaaatcgccgctggcgaagtggtggaacgccctgcgtcggttgttaaagagctggtagagaatagtctggatgcaggcgccacccgcgttgatatcgacatcgagcgtggcggcgcgaagcttattcgtattcgcgacaatggctgcggcattaaaaaagaggagctggcgctggcgctggcccgtcatgccaccagtaaaatcgcctcgcttgacgatctggaagcgattatcagtctgggatttcgcggcgaagcgctggccagtatcagttcggtctcgcgtttgacgctaacgtcgcgcacggcggagcaggcggaagcctggcaggcgtatgcggaagggcgcgatatggacgtgacggtaaaacccgccgcgcacccggtcggcaccaccctggaagttctggatctcttttacaatacgcccgcccggcgcaaattcatgcgtaccgaaaaaacggaatttaatcacatcgatgagatcatccgtcgtattgcattggcccgttttgacgtcacgcttaacctgtcgcacaacggcaaattggtacggcagtatcgcgctgtcgcaaaggacgggcaaaaagagcgccggttaggcgccatctgcggcacgccgtttctcgaacaggcactggcgatcgagtggcagcatggcgatctgaccctgcgcggctgggtcgccgatccgaatcacaccaccacggcgttaacggagatccagtactgttatgtgaatggccgcatgatgcgcgaccgcttgatcaaccatgccattcgccaggcctgtgaagataaactgggcgcggaccaacagcctgcgtttgtgctgtatctggagattgacccgcatcaggtggatgtcaatgttcatcccgccaagcacgaagtgcgttttcatcaatcccggctggtgcacgacttcatctatcaaggggtgctgagcgttctgcaacagcagacggaaacggcgctgccgctggaggagattgcgccagcgccgcggcatgtcccggaaaaccgtatcgccgccgggcgcaaccattttgctgtacccgccgagccaactgcggcgcgcgagcccgcgacaccgcgttattccggcggcgcatcgggcggtaacggcgggcgtcagtccgcaggtggttggccgcacgcgcagccaggttatcagaagcagcagggcgaggtttatcgcacgcttttacagacgccgacggcgagccccgcgccggagtcggttacgcctgcgcttgacggacatagccagagtttcggtcgcgtactgacaatagtcggcggtgactgcgcgttgctggaacacgcggggactatccagctcttgtcgctaccggttgcggagcgttggctgcgtcaggcgcagcttacaccgggtcaaagtccggtttgcgcgcagccgttgctgattccgctgcgtttaaaagtgagcgccgatgaaaaagccgcgctgcaaaaagcccaatctttgttgggagaattgggtattgaatttcagtcagatgcgcagcatgtgaccattcgggcggtgcctttacccttacgacaacaaaatttacaaatcttgattcctgaactgataggctacctggcgcaacagaccacatttgcaacggtcaatattgcacaatggatagcgcgtaatgtgcagagcgaacatccgcagtggtcgatggcgcaggccatatcgctgctggcggatgttgagcggctatgtccgcagctggtaaaagcgccgccgggtggcctgttacaacctgttgatttacattcggcgatgaacgccctgaagcatgaatgatgtaagcaaggcgagcctgcctaaggcgatatttttgatggggccgacggcctccggcaaaacggcgctggcgatagaactgcgtaaagttttgccagtagagttgataagcgttgattccgccctcatttatcggggaatggatattggcacggctaagccgaatgccgatgagctgaaagcggcgccgcatcgactgttggatatacgcgacccgtcgcaggcgtattcggcggcggattttcgccgcgacgcgttagcgcaaatggcggagatcaccgctgcggggcgtatcccgctgttagtgggcggtaccatgctgtattttaaggcattgctggaagggttatcgccgctgccttcagcagatccggaagtcagatcccggatagagcagcaagcagcggagctaggatgggaggcgttgcatcagcaacttcaggagatagatccggttgccgccgcgcgaattcatccaaatgatccgcaaagactttcccgggcactggaagtttttttcatttcgggtaaaactttaacggagctaacgcaaacgtcaggagacgcgctaccgtaccaggtgcatcagttcgctatcgccccggcgagccgtgaactgctccatcagcgcattgaactgcgttttcatcagatgttggcttcaggttttgaagcagaagtccgggcgctttttgcccgaggagatttgcatacggacttgccttccatccgttgtgtgggataccgccagatgtggtcatacattgagggcgaaatctcatatgatgaaatggtttatagaggtgtttgcgccacgagacagttggcgaagcgccagatgacctggttgcgcggttgggaaggggtgcgctggcttgacagtgagaatcccgatcgggcgcgaaaagaagtattacaggttgttggtgctatcgcagactgaatgtgtacaattgagacgtatcgtgcgcaatttttcagaatcgaaaggttcaaagtacaaataagcatataaggaaaagagaatggctaaggggcaatctttacaagatccgttcctgaacgcattgcgtcgggaacgtgttccagtttctatttatttggtgaatggtattaagctgcaaggtcaaatcgagtcctttgatcagttcgtgatcctgttgaagaacacggtcagccagatggtttataagcacgcgatttctactgttgtcccgtctcgcccggtttcccatcacagcaacaatgccggtggcggcgccagcaataactaccatcacggtagcaacgcgcaggggtctactgcgcaacaggacagcgaagagactgaataagttcacgcgctgtttatccatgtcgggggcgtcggataatcgcccccgctggttattaagagggtttacgcttgtttgaccgttatgatgccggtgagcaggcggtactggtacacatctatttttcgcaagacaaagatatggaagacctccaggagtttgaatctctggtctcttccgccggtgtcgaagcaatgcaggtgattaccggtagccgtaaagcaccgcacccgaagtactttgtaggtgaaggtaaggcagttgaaattgcggaagccgtgaaagcgactggcgcagcggtcgtattgtttgatcatgcattgagtccagcccaggagcgaaacctggagcgtttgtgcgagtgccgggttatcgatcgcaccggtcttatcttagatatttttgcccaacgtgcgcgtacccatgaaggtaagttgcaggttgagctggcgcagctacgccatctggctacgcgtctggtgcgtggctggacccaccttgaacgtcagaaaggcgggattggtttgcgcggtccgggtgaaacccagctcgaaaccgaccgtcgtttactgcgtaatcgcattgtgcagattcagtcgcgcctggagaaagttgagaagcaacgtgagcaggggcggcagtcgcgcatcaaggccgacgttccgacggtatcgctggtgggctataccaacgccggaaaatccaccctttttaatcagatcactgaagcgcgggtctatgcggcagatcagctatttgcgacgctggaccccacattacgtcgtattgatgtagcggatgtcggtgaaaccgttctggcggatacggtaggctttatccgccatttaccgcacgatctggtggctgcctttaaagctaccctgcaggagacgcgtcaggcgacgctgctgctgcatgtggtcgatgcggcggatgttcgtgtgcaggaaaacatcgaggcggtaaacaccgttcttgaagagattgacgctcacgaaatccccaccttaatggtgatgaacaaaatcgatatgctggacgactttgaaccgcgtatcgacagagatgaagagaataaacccatccgcgtttggctttcagcgcaaagcggcgtgggaataccacagctttttcaggctttgacggagcgtctttccggcgaggtggcgcagcatacgctgcgtttgccgccgcaggaagggcgtctgagaagccggttttatcagcttcaggcaatagaaaaagagtggatggaggaagacggtagcgtcagtctgcaggtacgaatgccgattgtcgactggcgtcgcctctgtaaacaagaaccggcgttgatcgaatacgtgatctagacgcgaagtcattcaggtcgtattgaggcggtagctgagagaatctcaggagctcacaacgaagtgacctggggtaaaaaagccgccactcaagacgcagcctgaaagatgatgtctgtaacggcggttcgtctgaagcatggagtaatttcgccttatcctctgaggtcgaaagacaacggggatcaccgcataacaaatatggagcacaaacatggcgtggaatcagcccggtaataacggacaggaccgcgacccgtggggaagcagcaaacctggcagcaactctgggggaaatggaaacaaaggtggccgcgatcagggacctcccgatctggatgatatcttccgtaagctgagtaaaaaactcggtggttttgggggcggtaaaggcaccggttccggcggcggtagctcatcgcaaggcccacgtccgcaactgggaggccgtattgtcgccatcgccgcggcggcagtagtcattatctgggcggccagcggtttttataccattaaagaagccgagcgcggcgttgtgacgcgttttggtaaattcagccatctggtagagccaggtctgaactggaagccgacatttattgacgacgtcacgccggtgaacgtcgaagcggtgcgcgaactggcggcgtcaggcgtgatgctgacgtctgatgaaaacgtcgtgcgcgttgaaatgaacgtgcaataccgcgtcaccgatccgcagaaatatctgtttagcgtgaccagcccggacgatagcctgcgtcaggccaccgacagcgcgctgcgtggcgtcattggtaaatacacgatggatcgcatcctgaccgaaggtcgtaccgttattcgtagcgatacccaacgcgagctggaagagactatcaaaccgtacaacatggggattaccctgctggacgtgaacttccaggctgcgcgcccgccggaagaggtgaaagccgcctttgacgacgcgattgccgcacgtgaaaacgagcagcagtacattcgtgaagcggaagcgtataccaacgaagttcagccgcgcgccaacggtcaggcgcagcgtattctggaagaggcacgcgcctataaaacccagactatcctggaagcgcagggtgaagtcgcccggtttgcgaagattttgccggaatataaagccgcgccgcagattacacgcgagcgtctgtatattgaaacgatggaaaaagtgctgagccatacccgtaaagtactggttaacgacaagagcggtaatttaatggtgctgccgttagatcagatgctgaaaggcgggaatgcgccggcggcaaagagcgacaatagcgccagcaacctgctgcgcctgccgccgtccacaaagtctaacgccagcggagcaagcaacacgtcgtcctcaaatcagggcgatattatggaccaacgccgcgcgaatgcgcagcgtaacgactaccagcgtcagggggaataacgatgcgtaagtcagttattgcgattatcatcatcgtgctggtagtgctctacatgtccgtctttgtggtcaaagagggcgagcgcggcattacgctgcgttttggtaaagttctgcgtgacgatgagaacaaaccgctggtttacgcgccgggtctgcactttaagatcccgtttattgaatcagtgaaaatgcttgatgcgcgtatccagacgatggataaccaggccgatcgctttgtgactaaagagaagaaagacctgattgtcgactcctacatcaaatggcgtatcagcgactttagccgttactatctggcgaccggcggcggcgatatttcgcaagccgaagtgctgttaaaacgtaagttctcggaccgtttgcgttctgagattggtcgcctggacgtaaaagacatcgtgaccgattctcgtggtcgtctgactctggaggtgcgcgacgcgctgaactccggttcagccggtaccgatgatgaagtagcgaccccggcggcggatgacgcgattgccgaagcggcggaacgcgtcacggcggaaaccaaaggtaaagtaccggtcatcaacccgaacagtatggcggcgttgggtatcgaagtggtcgatgtgcgtattaagcagatcaacctgccgaccgaggtttctgaggcgatttacaaccgtatgcgcgccgagcgtgaagcggtcgcgcgtcgtcatcgctcacaaggtcaggaagaagcggaaaaactgcgtgcggctgctgactatgaggtgacgaaaactctggcggaagccgagcgtcaggggcgtatcatgcgtggtgaaggtgatgctgaagccgcgaagctgtttgccgacgcgttcagccaggaccctgatttctacgcgttcattcgtagtctgcgcgcttacgagaagagcttcgaaggtaatcaggacgtgatggtactgagcccggacagcgatttcttccgctacatgaagacaccgagttcgacgacacgctaaaatagcgtcagcggttttagaccagcaaaaccaccgcatccaaaggatgccggtggttttcttttataagggcgataaatgaattcaacaatctggttggcgcttgctctggtattagtcctcgaagggctgggaccgatgctgtatcccggcgcatggaaaaaaatggtttcggcactggcgcaactgccggaaaatgttttacgtcgttttggcggcggacttgtggtcgcgggagttgtggtctactacatgttgaggaaaacgattggctgagcaaaaagtggtcggatttgccgcagattgagtgcaaaaagtgctgtatatctgaaaaagcgatggtagaatccatttttaagcaaacggtgattttgaaaaatgggtaacaacgtcgtcgtactgggcacccaatggggtgacgaaggtaaaggaaagatcgtcgatcttctgactgaacgggctaaatatgttgtacgctaccagggcggtcacaacgcaggccatactctcgtaatcaacggtgaaaaaaccgttctccatcttattccatcaggtattcttcgcgagaatgtaaccagcatcatcggtaacggtgttgtgctgtctccgagcgcgctgatgaaagagatgaaagaactggaagaccgtggcatccccgttcgtgagcgtctgctgctgtctgaagcctgtccgctgatccttgattatcacgttgcgctggataacgcgcgtgagaaagcgcgtggcgcgaaagcgatcggcaccaccgggcgtggaatcgggcctgcttatgaagataaagtggcacgtcgcggtctgcgtgttggtgaccttttcgacaaagaaaccttcgctgaaaaactgaaagaagtgatggaatatcacaacttccagttggttaactactacaaagctgaagcggttgattaccagaaagttctggatgatacgatggctgttgccgacatcctgacttctatggttgttgacgtttcggacctgctcgaccaggcgcgtcagcgtggcgatttcgtcatgtttgaaggtgcgcagggtaccctgctggatatcgaccacggtacttatccgtacgtaacttcttctaacaccactgcaggtggcgtggcgaccggttccggcctgggcccgcgttatgttgattacgttctgggtatcctcaaagcttactccactcgcgtaggtgcgggtccgttcccgaccgaactgtttgatgaaaccggcgagttcctctgcaagcagggtaacgaatatggcgctactaccggccgtcgtcgtcgtaccggctggctggacaccgttgccgttcgtcgtgcggtacagctgaactccctgtctggcttctgcctgaccaaactggacgtgctggatggcctgaaagaggtgaaactctgcgtggcttaccgtatgccggatggtcgcgaagtgactaccactccgctggcagctgacgactggaaaggtgtagagccgatttacgaaaccatgccgggctggtctgaatccaccttcggcgtgaaagatcgtagcggtctgccgcaggcggcgctgaactacatcaagcgtattgaagaactgaccggcgtgccgattgatattatttctaccggccccgatcgtactgagacgatgattctgcgcgacccgttcgacgcgtaaatctggtacgcctggcagatattttgcttgccgggctaacagtgtgatacattgctgtgtcgggtaagccattacgctatccgacacagtgttaaatcctcgcttttttccttccccgaactgaaataaattagcgacacagcttgtggctggtttatcatcaatataaatgtatttttcccgttttcccttttcctgaggttgatgtgcagttaacgagtttcaccgattacggcttacgtgcgctaatctatatggcgtcgttaccagatggacgaatgaccagcatttctgaggtgacagaagtctacggcgtgtcccgtaatcatatggtcaaaattatcaatcagcttagccgggcgggctttgtcaccgccgttcggggaaaaaatggcggtatccgcctgggtaaaccggctaatactatttgtattggcgatgtggtgcgtgagctggaacccttatcactggtcaactgtagcagcgaattttgccacatcacccctgcctgtcgtctgaaacaggcgctttctaaggccgtgcagagttttctcaaggagctggataactacacgcttgccgatttggttgaagagaatcaaccgctttataaattattactggtggagtgaagtaaacttcattagagatgacaatggaggaacctcaatgtcacaagatcctttccaggaacgcgaagcagaaaaatacgcgaatcctatcccgagccgggaatttatcctcgaacatttaacgaaacgtgaaaaaccggccagtcgcgaagaactggccgtagaactgaatattgaaggcgaagagcagcttgaagccttgcgtcgccgcctgcgcgcgatggagcgcgacggacaactggtctttacccgccgccagtgctatgcgctgccggaacgcctcgacctgctgaaaggcaccgtgatcggtcatcgtgatggttacggtttcttacgtgtcgaaggccgcaaagacgatctgtatctttccagcgagcaaatgaaaacctgtattcatggcgatcaggtgctggcgcagccgctgggcgccgatcgtaaaggtcgccgcgaagcgcgtatcgtccgtgtactggtaccgaaaaccagtcagatagtcgggcgttatttcaccgatgcgggcgtcggctttgtggtgccggacgacagccgcctaagcttcgacattcttatcccgccagaagacgtcatgggcgcgcggatggggttcgtggtcgtggttgaactgacccaacgtccaactcgccgtactaaagcggtagggaaaatcgtcgaagtgctgggcgacaatatgggcaccggtatggcggttgatatggcgctgcgtacccatgaaataccttacatctggccgcaggcggtagagcagcaggtcgccgggctgaaagaagaggtgccggaagaggcgaaagtcggtcgtgtcgatctgcgcgatttgccgctggtcactattgatggcgaagatgcccgtgactttgacgacgcggtttactgtgagaaaaaacgcggcggcggctggcgtttgtgggtcgctattgctgacgtgagctattatgtacggccgccaacgccgctggatcgcgaggcgcgcaatcgcggcacgtcggtttacttcccgtcacaggttgtcccaatgttgccggaggtgctctccaacggtctgtgttcgctaaacccgcaggttgacaggctgtgtatggtctgtgaaatgaccatctcggcgaaaggtcggctgaccggctacaaattctatgaagcggtgatgagctcccatgcgcgtctgacctataccaaagtctggcatatgctgcagggcgatcaggatctgcgtgaacaatatgcgccgctggtgaagcatattgaagagctgcacaacctctacaaagtgctggataaagcgcgtgaagagcgcggggggatctcgtttgagagcgaagaggcgaagtttatctttaacgccgaacgtcgcattgagcgtatcgaacagacccagcgtaatgacgcgcataagcttatcgaagagtgcatgatcatggcgaatatctcggcggcgcgctttgtcgaaaaagctaaagagccggcgttattccgtattcatgataagcccaccaccgaagcgatcacctcattccgctccgtactggcggagctggggttggagctgccgggcggaaacaaaccggaaccgcgcgattatgccgaactgcttgaatcgattgccgaccggccggacgccgaaatgctgcaaactatgctgctgcgttcaatgaagcaggcgatttacgatccggaaaaccgcgggcactttggcctggcgttgcagtcttatgcgcactttacctcgccgattcgccgctatccggatctttctttgcaccgcgccattaagtacctgctggcgaaagagcaagggaacaagggcaacaccacagaaacgggcggttatcactactcgatggaagagatgttgcagctcggtcagcactgttcgatggcggaacgccgcgctgatgaagcgacgcgtgatgtctccgactggctgaaatgtgactttatgctggatcaggtaggcaacgtctttaagggcgtgattgccagcgtcaccggtttcggcttctttgtccgtcttgatgaactgtttatcgatgggctggtacacgtttcctcactggataacgattactatcgcttcgatcaggtagggcaacgtctgattggcgagtccggcgggcagacatatcgcctgggcgaccgggtcgaggtacgcgtcgaagcggtgaatatggacgaacggaaaattgactttagcctgatctccagcgagcgcgcaccgcgtaacgtcggcaaaacggcgcgtgaaaaagcgaaaaaaggtgaaagtaaaaacgccggtaaacgtcgtcaggtaggtaaaaaagttaacttcgagcctgatagcgccttccgcggcgagaaaaaagcgaagccgaaagcagcgaagaaagacgcgagaaaagcaaaaaagccatcggctaaaacgcagaaaatagccgcagcgaccaaagcgaagcgtgcggcgaagaaaaaagcggcagagtgagcaataccctcttcaaacagaagagggtcaattatctgtaggccgggcaagcgtagcgcccccggcaaaacgtaaacaacgagtacattaatgagcgaaatgatttacggcatccacgcagtgcaggccctgctggagcgcgcccctgaacgttttcaggaagtctttattttaaaaggccgtgaagataaacgtctgttgccgctgatccacgcccttgagtcccagggcgtggttatccagctggcaaaccgccaatatctcgacgagaaaagcgacggtgccgtgcatcagggtattatcgctcgcgtgaaaccaggccggcagtatcaggaaaacgatctgccggatctgatcgcattacacgatcgcccttttttgttgatcctcgatggcgtcaccgatccgcataatcttggcgcctgtctgcgcagcgccgatgctgcaggcgtacatgcggtaatcgtgccgaaagaccgctccgcgcaacttaacgcgacggcgaagaaagtcgcctgcggcgcagcggaaagcgtgccgttgatccgcgtcaccaacctggcgcgcacgatgcgcatgttgcaggaagagaatatctggattgtcggaacggcgggcgaggctgaccatacgctgtatcagagcaaaatgcctggccgcatggcgctggtcatgggcgcagaaggtgaaggtatgcgtcgtctgacccgtgagcactgcgatgagctgatcagcattcctatggccggtagcgtgtcgtcgctgaatgtctctgtggcgaccgggatttgtctgtttgaagccgttcgccagcgcacctgatgctgatagtattttttaagaaaaaaccatccataatcggatggtttttttttatctttgactggtaatataaaaaacaaaacctaccctgtaatttcttttatttataaaaatgagatagagataaaaatatggcatggactccacggacgctggcggatgcattaaacaacatcgccgaattagatattgatatagaaaataatgaatcttcattaataataaaaatgaatgattatggcgatttaccactggcggttttatttacctcgcaacaaatagttatcgagacttatatctgtccggtaaatacgattagagataccgcggaatttaatcttttcttgctgagaaatcagaaggttttaccgctgtcttcggtcggtattacccaggtaaaacaggaggaatattatgtcgcttttggcgcgctgtcgttaaattcgtcgcttgccgacgtgatgctggaaatcaccacgcttgtagaaaatgcgttggatatcgctgaaataacacaagtctattcacaggaataatacaggcggcttacatgggaattttaaaaagtttgttcacgttaggtaaatcattcgttgctcaggcagaggaagccattgatgaagcacagggtgtacgtatgctggagcagcatattcgcgacgcaaaagccgagctggataaagcgggtaaatccagagtggatttattggcgcgggtgaagctaagccatgacaagctgaatgatttacgtgagcgtaaagccagccttgaaacacgggcgttggcggcaatgagtaagaatgtcgacgccgctttactcaacgaagtggcggaagaaatagcccgtctggaaaatgccattcttgccgaagaacaggtgctgactaatctggaagcctctcgcgatgcggtggagaaggccgtaacggcgacaggccagcggattgcgcagtttgagcagcaacttgaagtggttaaggcgacagaagccatgcagcgcgcgcagcaggcggtgacgacctcgaccgtcggagccgcgtcgaatgtgtctacggcggcggagtcgcttaaacgtttacaaacgcgtcaggctgaacgccaggcccggctggatgccgccgcgcagctggaaaaagtcgccgatggacgcgacctggatgaaaaactggcgcaggccggtattggcgcaaccaataaaagcaatgctcagggtgtgttggcgcgtttacagcgtcaacaaggcgaataatgctctttacgtggattgtcaaaacctgccagcgtcatttgtccagactgacctggcccgctttgctgggcctgtttatcgggcagtatctgctttgttatctggtgctgcgcctgttgcgcgaaagcgcgttggtgagccagttaagcgattttatctattactgctcggtggtgggttccacattaggttttggcgatcttagcccgcagacggcgccaggacgtctgttcaccgcgctgtggcaaattccggttagcgtcgggttgttcggcgcgttaatgggaaaagtgattgcgcaggtacagggaatgttagcgaaaggaataacgggcatgggcgattatcgccatttacaccatcatatgctggtgattggctggcggggtcatcaaaccgaaaagatgatctcattgctgctatatgacaagcggcgtgcctttgaacgggttctgctgtgcgaactggaagatattcagcatccgctgccgggtaataactgggtggattttatccgcatcagcaactttaacgatccgcaggaacaccagcgcatggggctggagcagtgccagagcgtgattattttcgctcgtaccgatgagcagaccttcacggcggcgctctcgctggcagactatgtacccgcgcagtgccatattgtggtttatctggaagacgagcgttatgccggattactggaaacccactgcccgcgcatggagatagtccgtaacctttccgctgaacaactttcccgttccattcaggacccaggatcatcgcaatctgtcgcttccattatgaatccgatgctgggcgataccggattcgcgctgcctgtcccggcttctgtcgcgcctatgcgatacggcgcgctaatgcgttatatgaagcttcatcatgacgcgacggtgctggggatcagtcactgcaagaatggtcgtggtatggaattgaatccggtgatttcaactgaagtcagaggcggtatgtggctacatctggtcggtaataatcgcattctggctgaagaggtcgcatggcaagagatagaggttcccctatgatgcaattttttcagcgtttgctcggtaaaacaagcgcgccagcgccgattcgcggaccattaggattacatcttaacgccggtttcacgctggatacgctggcatttcggctactggagtcgtcgttgctggtggcgctaccgggtgaaaaatacactgtcgcggcagcgagtcgcatagatttaggcggcggcagtcagatttttcgctactacacctctggcgatgagtttctacaaattaacaccactggcggcacggatgttgacgacattgatgacatcaaactttttgtatatgaggaaagtttcggtattaacgaggaacgtcactggcgttcagccattgcgccagcggcaatagggccgatgacgctcaactggcaagaacggcgctggcagcgcttttttaaccatgaagagccgggcaatattgaacctgtctacatgctggaaaaggttgaaaatcagcaggcagagaaatgggacgttcacaattttacgatgggcttccagcgccaggtgacggatgacgcctgggagtatcttctattgaacggggaagaatcatttaatgagcgcggtgagcctgaatgggtgttttcacgcgccctcggcgtggatatcccgctcacttcactgacggttattggttaagcacatacagggaaattatgcatatactggacgcattactggctttctgcgcctatttttttattggcgcggcaatggtcattgtatttctttttatttactcaaagataacgccgcataatgaatggcagttgataaaaaataacaatactgcggcatcgctggcctttagcggtacgttgctgggctatgtcatccccttatccagcgcggcgataaactcggtcagtatcccggactattttgcctggggcggcattgcgctggtgattcaactgctgatttatggttgcgtaaggttatacatgcctacgctgagcgaaaaaattattcatcacaacgtggcggcggggctatttatgggaaccgcagcgctggctggcggtatttttaacgctgcctgtatgacatggtaacggaagatcatggcaaaaaaacgaaaatccagaagcacatccggcgtaggccattcggcaataagacgaatagccgaaccggtcaatccctttgagcggcaacgaaatcgctacacgccaaaatgcctgacgctggcgattatgggtggagcggccttttttctcctgaaagggtgcggtgatggcggcaatagtgacaacgacggcgatgggacgttttacgccacggtgaacgactgtattgacgatggcaatagcgccagcgtttgcgctgacggctggaataatgcgaaaacagaattttacgctaatgtgcctaagcaattgacgcaggagcgctgtcagacgcagtttggcgattgctactttgatattaccgagcggagctgggttccggtattaagcggctttttactcagccgcgcgattcgtcagaaccgtgatgaacaatacatctatagcagcggcggttcatcttatgtctcccgtcccgtctggcgcaccacatccggcgactatgcgtggcgcagcggcacagggaaaagcgataccgcgaccagccctggttatatcacacggaaagcgtccaccgtctcccgcggcggctatggccgttcttccagcgcccgcgggcactggggaggctaaccatgctacgacacaacgtaccgatacgtcgggatctggataagatcgcctgcgatcacggttttgactttcatgttatcgataacgaaatttactgggatgaaagccgggcctaccgttttacattacggcaaattgaagaacagatcgaaaaaccgaccgcagagcttcatcagatgtgtctggagattgtcgagcgggccgtccgggatgagcagagcatgcagcagctggcgatcccgccattgtactgggatgtcatcgccgaaagttggcgcagccgcgatccttcgctttacgggcggatggatttcgtctggtgcggcaaagatccggttaaattgctggaatacaatgcggatacgccgacgtcgctctatgagtcctcctactttcaatggctatggctggaggatgcccgtcgtagcggcgccatcccgcgtgatgccgatcaatacaacgcgatacaggagcggctgatcgcccgcttcagcgagctgtacagtcgggaaccgctctacttttgctgttgtgaagataccgacgaagatcgcacgacggtgctgtaccttcaggattgcgcgcagcaggcggggcaggaaacgcgatttatctatattgaagaactggggcttggcgtaggcggcgtgctgaccgatctggacgataacgtgattcgccgcgcctttaagctctacccgctggaatggatgatgcgcgatgacaacggcccgctgttgcgaaaacgtcgtgagcaatggattgagccattgtggaaaagtattctgagtaacaaagggctgttgccgttattgtggcgctttttccctggccatccgaatcttctgccggcctggtttgagggcgaaaaatcgctcgcagcgccaggcgaaagcagcgtacggaagccgatttattcacgtgaaggcggcaacgtcacgattttcgacgagcggcaaaatgttatcgatcatgccgacggcgactacgctgacgagccgatgatttaccaggcgtttcagcctttgccgcgctttggcgatagctatacgctgattggcagttggatcattgacgatgaagcctccgggatggggattcgcgaggacaatacgctaattaccaaagacacttcccgtttcgtcccacattatattgccggttaatcatacttttgtgatcttgctccggcgtcaatggcgcagtcatgaccatacttgacttcagcgccattgaaggagggagacaccatgtcctggcaaacacataccgtctttaatcaacctgctccgctcaataacagtaacttattcctgtctgatggcgcgctgtgtgaagcggtttcccgggaaggcgcgggatgggatagcgatcttctcgccagcattggccaacaactgggaacggcagaatcactggaactggggcgtctggcgaacgcgcatcctcctgagttgctgcgttacgatccccagggacagcgtttggatgacgttcgctttcatcccgcctggcacctgttgatgcaggggctttgcgctaatcgggtacataacctggcctgggaggaggaggcaagggcgggaagttttgtcgcccgggcggcgcgttttgtattacatgctcaggtagaagcgggaacactctgtcctgtcacgatgacctttgccgcgacaccgttgctattgcagatgcttcccgccactttccatgactggctggcgccgctgcgcagcgatcgctacgattcgcatttgctgccgggcgggcaaaagcggggtctgctcatcggcatgggaatgacggaaaagcagggcggatcggacgtactcagtaatacgacccacgcggagcggctggcggatgattcatatcggctggtgggacataaatggtttttctctgtgccgcaaagtgatgcgcacctcgtgttggcgcaggcaaaaggaggactatcctgtttctttgtgccgcgtttcctgccagacgggcaacggaactctgttcgtcttgaacgcctgaaagataaactcggtaatcgatctaatgccagcgccgaagtcgagtttcaggatgctatcggctggcggctgggagaagagggcgaagggattcggcatatcttaaagatgggcggtatgacgcgtcttgactgcgcgctcgggagtcatggcttaatgcggcgcgcattttcagtcgccatttaccatgctcatcagcgtcaggcttttggtaagccgctgatcgatcaaccgttgatgcgacaaaccttaagtcgtatggcgctatgcctggaggggcagacggcgcttttgtttcggctggcgcgcgcctgggagcaacgtcgcgaggcgaaagaggcattatgggcgcgattattcacgccagcggcgaaattcgccatctgtaagctgggaatcccttttgtggctgaggcgatggaggttctcggcgggatggggtattgcgaagagagcgaactcccgcgcctgtaccgtgaaatgccggtgaacagtatctgggaaggttccggcaatatcatgtgtctggatgtactgcgggtgctgacaaaacaacacggcgtctatgacgtattgagtgaagcttttgcggaagtcaaaggtcaggatcgccattacgaccgcgcggtacgtcagctacagcaacgtttacgcaaaccggacgaagcaatgggcagagagattacgcagcagcttttcttgctggggtgcggagcggaaatgctgcgtcatgcctcgccgccgctggcgcaagcgtggtgtcagatgatgctggatacacgcggcgaaatgccgctgcctgcccaggtgcaaaatgatttactgttaagggcgaccgggggactgcggtaacgtttgacctgtagtacatgccatccggcgcgagccacgcggcatcaggcatagagtatcgcctgtacgcgccagttatccgactgttgttcttcatacatttgaataattctgtaccaggacgcaccctgttcatcggctttcagggcgataatccgctctacatcctgtgggtttcctgcaacattactgaccgagatcaggccgatttcattcagacccgttacgcagtcagcactggcgaattcggcagactgtgccgtcgtactcaccagtccggcagaaagcagcagtgaggataaggcaagttcttgtttcatcgtcagctccttattacataccccgcatttaacaggacgctccatcacggtaaacctgtttgtttattgtgcacaggtaaacgcataagggcgcaaagcaatgtaaaactgactaaaaatcaatctactgttattgacgatacaaaatggcttgtgaataccactggccggttacaaccgtttcatcaaccattaagataacgtaataatcggctttcgcagcgacggctttcgctctgatttcatctattgcatcatccggggagccccgaaccagcgcgcttacggtccccatccgctgtagtccttgcgtttgatcgcgacggatttcctgcgggtgatcggcgacaggcggcgcaggttgcggcgtaccctgcagcacgctacacgcgcttaataacagcgctgctatcaatgaagcaaaccgacgcataactctatctcgtttcctgataatcatagtgtaatgccttattgatttccctttagggggaatgttcccgaagtgttacctgtcacgcgattttcgaatgaaaacgttgcgaaagcgtaacccagttctcaaacattatgaattattgcgctatccataaacttgcgttaagtatttctccgtggcataccggataaaaaggagagaataatgatagcgattgaaacacgacaattagccggaggcgtcgtactacatgccttcccggaagggaaacgcgccgtgccgcttccctgtgtggtgttctatcatggcttcacctcctccagcctggtttatagttattttgccgttgccctggcacaggcaggattccgggtagtcatgccggatgcgccggagcatggcgctcgcttcggcggcgactcacagggacgaatacaccgattctggcagattctgcaccaaaacatgcaggaatttacgacgttacgtgcggcgattcaggcggaaaactggctacttgacgggcggttggcggtgggcggcgcatccatgggcggtatgacggcgctgggcattatgacgcgtcaccgagaggtaaaatgcggggccagtttaatggggtcgggctattttaccgggctcgcccggacgcttttcccgccgttatccccgcagaacccggcacagcaggcggaattcgacaatatcatcgcgccgctacgtgaatgggaagtcacacaccagttagagcgactggccgacaggccgcttctgttgtggcatggtcaggaggatgacgtggtgcctgctatcgaaaccttccggctccagcaggcactcgccgcggcgaagctggataagcatgtgacctgtttatgggccgcaggcgtgcggcatcgcattacgccagaagcgttgtcggcgacggtagcgtttttccgacagcatctttaaacgcggagtatgcttacaccctgggcttcaagctgttgcaaaacctgcggattggcatttttgccggtaatcagcatagcgatctgatcggcgcggctgaacagcatccccgcgcgctcgccaattttactgctatcgaccagcgcgaccagtttcccgacgacgctgagcattttttgttccgccatggcggttagcatatcggtcttgtacaggccatctgcggttaagccctttccgctggtaaacatccagtggccagcatagagactgttttcacttccctgcgggctcagggtaatcgactggcttttattatactgaccacccatgataatcacgctgtcatgctcttgatcgatcagataattcgccagcggcagatagttggtaatgatctgtaccggcttcccgcacatttcacgccccagcaggaaagcggtggagccgcagttaatcactacgctttcacccgggtttaccagctgcgacgccgctttcgcgatgcgtactttttcatcgtggttttgcgcctggtgcagattcatcggcgtccagcggggccgctgttgggtaatggcctctgcgccgttgcgcacttttttaagtttcccgctttcgtcgagcttgttgatgtcgcggcgcgctgtcgccggggagatccccagacgctcaatcacgttttcgacggtaacaaagcccaactgtgccagcatatccagcagtatttgatgtctttgtgcttcagtcatgagctattccgatacaaattgatttgaaaagatgatatttgaaatagcctggaaatactaaagtaaatggaaaaaatgccgggtaatcccggcatgatatcgactcacaggaaggatttgaacggtagatcgggttcaatggtaaagcaatcgtcaaacccacgcggatagtggtattcgaaattgtctttatccagcggccaggtaaacttgccgccaacctgccagataaacggtttaaaaccatacttcaggcgatctttcttcatttcccatagcacgcggatctcttgcggatcggcctggaagttcgaccagatatcgtgatggaacgggatcaccactttggtattcagcgattccgccatgcgtaaaatatccgcgctggtcattttgtccgtaataccgcgcgggttttcaccgtaagaaccgagcgcgacatcaatttgatgttcgttgccgtgtttcgcgtagtagttggaatagtgagaatcgccgctgtgatagagattgccgcccggcgttttaaacagatagttaaccgcgcgtacatccatgccgtccggcagtacgccagcggctttctgatcggcgggcagggtgattaatgcggtgcggtcaaaggcatcaagcgcatgaatttcaatatctttcactttcacgacatcgcccggttttaccacgatgcagcgttctttcggcacgccccagccaacccataaatccacgcaggtctgcgggccgataaacggaacatcatcggcgcaattctgcattacggcagccgcgacattgacgtcaatgtgatcgttatggtcgtgggtcgccaggacggcgtcaatctgacggatagcgaaaggatcgagaacaaacggcgtggtgcgcaggttaggctgtaattttttgacgccagccatacgctgcatctggtggccggttttcatcaacggattaccgtggctctgtttaccggtaccgcaccagaaatcgacgcatacgttagtgccgccttcagattttagccagatcccggtacagcccagccaccacatagcgaacgtacccggcgcgacctgctcttgttcaatctcttcgttcagccagcttccccactccggaaacgtgctcagaatccatgattcacgcgtgatgctttgtactttactcatcgcatttaccttcatgtttgttcaaaatggttcaaaacgtgatttgttttgattaatcctgacactattttctcaagaaggcaatgggctattttttgactttttggaaggagagaacgcagtcaggagaagatttaatcttgtctggcgtcatgtgaatgtttgcatctttatgattttacttattttaatgaaaaaatgagttacctataagtaaaccatgtattaagtgtgctaattatttgcgcgctacgtcacagttaatcaaatttaatcttgttgtgattacttttgaaaattaaagtgaagggactttatcctgagcgcctgtgactcagcaacctcgtctaccggagatcgttatggagatcctctacaacatctttaccattttctttaatcaggtaatgaccaatgccccgctattactgggtattgtgacctgcctgggctatatcctgctgcgcaaaagcgtcagcgtgatcatcaaagggacgatcaaaaccatcattggcttcatgctgctacaggccgggtccggcattctgaccagcacctttaaaccggtggtggcgaaaatgtctgaggtctacggcatcaacggcgcgatttccgatacctatgcttcgatgatggcaacgatcgaacggatgggtgatgcgtatagttgggtaggctacgcggtgttgctcgcgctggcgctgaatatttgttacgtcttgttgcgacgcattaccggtattcgcaccatcatgttgaccgggcacatcatgttccagcaggcggggctgattgcggtctctttctatatcttcggctattccatgtggaccaccattatctgcacggcgatactggtttccctgtactggggtattacctccaacatgatgtacaagccgactcaggaagtgacggacggctgcggtttctccattggtcaccagcagcagtttgcttcctggattgcctataaagtcgcgccgttcctgggcaaaaaagaggaaagcgttgaagacctcaaactgccgggctggctgaacattttccatgacaacatcgtctccacggcgattgtaatgaccatcttctttggtgccattctgctctcttttggtatcgataccgtacaggcgatggcgggtaaaacccactggacaatctatatcctgcaaaccggtttctcctttgcggtggcgatcttcatcatcacccaaggcgtgcgtatgtttgtcgccgagctctctgaggcctttaacggtatctcccagcgtctgattccgggcgcagtactggcgattgactgcgccgctatttatagcttcgcgcctaacgcggtggtctggggctttatgtggggcaccatcggccagctgattgcggttggcatcctggttgcctgcggctcctcgatcctgattattcctggctttatcccgatgttcttctctaacgccactatcggcgtgttcgctaaccacttcggcggctggcgtgcggcgctgaaaatttgtctggtgatggggatgattgaaatctttggttgcgtctgggcggtgaaactcaccggtatgagtgcctggatgggtatggcggactggtcgattctggcaccgccgatgatgcagggcttcttctccctcggtatcgcctttatggccgtcatcattgtaattgcactggcttatatgttcttcgctggccgcgcactgcgcgcagaagaagatgcagaaaaacaactggcagaacagtctgcttaataaggagttttgattatgaccgtacgtattctggctgtgtgtggcaacggacagggcagttccatgatcatgaaaatgaaagtggaccagtttttaacccaatcaaacattgaccacacggtaaacagctgcgcggttggcgagtacaaaagcgagttgagcggcgcggatatcatcatcgcttctacccatattgcaggcgaaatcagcgtgaccggcaacaaatatgtggttggcgtgcgcaacatgctgtcgcctgcggattttggcccgaaactgctggaagtgatcaaagaacatttcccgcaagacgtgaagtaaggatgcaacatgaaattacgtgattcactggcggagaataattctatccgcctgcaggctgaagcgaatacctggcaggaagccgtcaagatcggcgtcgatttactggtggctgcagacgtggtagagccgcgctattaccaggcgattctggatggcgttgagcagtttggcccctattttgtgattgcccccggcctggcgatgccgcatggccgcccggaagaaggggtgaagaaaaccggtttttcgctggtgaccctgaaaaagccgctggagttcaaccacgaagataacgacccggtcgatattctgatcaccatggcggcggttgatgccaacactcaccaggaagtgggcatcatgcagatcgtcaacctgtttgaagacgaagctaattttgaccgtttacgcgcctgccgtaccgcgcaggaagtcctggatctcattgaccgcaccaacgcggcagcttaagaaggaattgaaaatgtcattaccaatgttgcaggtcgcgctggacaaccagactatggatagcgcctatgaaaccactcgcctgattgccgaagaagtcgacattatcgaagtgggcaccattctgtgcgtgggcgaaggcgtgcgtgcggttcgcgacctgaaagcgctttacccgcacaaaatcgtgctggcggacgccaaaattgccgatgccggtaaaatcctctcccgtatgtgtttcgaagccaacgcggactgggtgaccgtgatttgctgtgcggatatcaacaccgcaaaaggcgcgctggatgtggcgaaagagttcaacggcgacgtgcagatcgaactgaccggttactggacctgggaacaggcgcagcagtggcgtgatgcgggtattcagcaagtggtttatcaccgcagccgtgacgcgcaggcggcaggcgtggcgtggggcgaggcggatattaccgcgattaagcggctgtccgatatgggctttaaagtgaccgtgaccggcggactggcgctggaagacctgccgctgttcaaaggcattccgatccatgtctttatcgcggggcgcagcattcgcgatgccgaatcgccggtagaagccacacggcagttcaaacgctccattgcccaactgtggggctaaggagcggctatgctgtcgaaacaaattccgctcggcatctatgaaaaagcgctccctgccggggagtgctggctggagcgcctgcggctggcgaaaacgctgggttttgacttcgttgaaatgtcggtggacgagaccgacgcccgactggcgcggctcgactggagtcgcgagcagcgcctggcgctggtgagcgcggttgctgaaaccggcgtgcgtgtgccgtccatgtgtctgagcgcgcatcgtcgttttccgctcggtagcgaagatgacgcgatacgggcgcaggggctggagattatgcgtaaagcgattcagtttgcgcaggacgtcgggattcgcgtcattcaactggcggggtacgacgtttactatcagcaggccaacgacgaaacgcgttgccgcttccgcgatgggttaaaagagagcgttgatatggccagccgcgcccaggtgacactggcgatggagatcatggactacccgctgatgaattccatcagtaaagcgctgggctatgctcactacctcaataacccgtggttccagctctatccagatatcggcaatctgtctgcctgggataacgacgtacagatggagctacaggcgggaatcgggcatatcgtcgcggtacacgtcaaagatactaaacccggcgtgttcaaaaatgtgccgtttggcgaaggcgttgtcgatttcgaacgctgcttcgaaacgctcaaacagagtggctattgcgggccctatctgattgagatgtggagcgaaacagcagagaacccggcggcagaggtagcgaaagcgcgtgactgggtgaaagcgcgcatggccagcgccggtctggtggaggcagcctaatgcaaaagctcaagcagcaggtatttgacgctaacatggatttgccccgttatgggctggtgacctttacctggggcaacgtcagcgctatcgatcgcgaacgcgggctggtggtgattaagccaagcggtgtcgcctatgaaaccatgaaggtagatgacatggtggtggtggatatggatggcaaagtggtggagggacgttatcgtccttcttccgataccgctacccatctggcgctgtatcaacgctatccgtcgcttggcggcgtcgttcatacccactccacccacgccacggcatgggcgcaggcggggatggctattccagcgctcggcaccacgcacgcggactatttctttggcgatattccttgtaccagagcgttaagcgaagaagaagtgcagggcgagtacgagctgaacaccggcaaggtgatcatcgaaacgctgggcgaggtggaaccgctgcatacgccaggtattgtcgtgtatcaacacgggccgttcgcctgggggaaagatgcgcacgatgcggtacataacgcggtcgtcatggaggaagtggcgcgaatggcgtggattgcgcgcggtattaacccggcgctgaatcccatcgacgattatctgatgaataaacacttcatgcgtaagcatggcccgaatgcgtattacgggcagaagtgaagtatgagctccggaatgtgaatattatcgggatgtcacaggtctaattccggagccatctttccgcgaaaaaagccccctgctcagggggcaaatcaactatggctttttcgttggttttcctgatgctagcgataaatattcgcgctggcgtgtatattgccgttgctacccggttcccggataagtatgacgtgataatacattgcgtttcgcacgtcggcctcttcattcagcgccagattggcttcactttccgtggcgaagttatggttgatgtagattacgcctaagctgcgcacatcatccatatttctggcctgatgattatttaactcgacggctgccgttgccgttatgccaggcaaaagcgcagccagaaataacattatccgggctcgcatagagtacctcctcagcagcgcggtctggttggcgatatccccctttagtgaatcgcttctggtttaattttaaccataacccgccgcagagatggcgaccttttctgatgctgttgttcaaaaaattatcgcattgtcgctttttacctgattaacaacccattgatgtatgccgccatgtttaagaaatcctgtgtggcaaaaaagtgcgctgaccacagtgtcaatttctctgccgcaacaggccgtttatagtggcatgcgatatgaagttaatatctcagcagcaaaatgtgacgggacaggcgttacgttcggcacgataaataattgtacaatcaccttgagtttgcccgcaggcgccagtattataacgcgtcatttttcagccgacctttaacacgttccttgcctccatgggccgcggctgacccagacaggaggctgaataatccgtaaggagcaattcgatgcgtcattacgaaatcgtttttatggtccatcctgaccagagcgaacaggttccgggtatgatcgagcgttactctgccgccatcactggcgcagaaggcaagatccaccgtctggaagactggggccgccgtcagctggcttacccgatcaacaaactgcacaaagcgcactacgttctgatgaacgttgaagcgccgcaggaagtgatcgatgagctggaaactaccttccgcttcaacgatgccgttatccgcagcatggttatgcgtactaagcacgctgttaccgaagcttctccgatggttaaagcgaaagacgagcgccgtgagcgtcgcgatgatttcgctaacgaaaccgcagatgatgctgaagctggggattctgaagagtaatttctgatgaccaaccgtctggcgttgtccggcaccgtgtgcagggccccccttcgaaaggtcagtccatcaggaattccgcattgccagttcgtgcttgagcatcgttctgtgcaagaggaagccggctttcaccggcaggcgtggtgccaaatgcccgttattgttagcggacacgaaaaccaggccattactcacagtataacggtcggcagccgcataaccgttcaggggtttatttcttgccacaaggcaaagaacggtctgagcaaaatggttctgcatgccgagcagattgaattgatagattctggagactagccatatggcacgttatttccgtcgtcgcaagttctgccgtttcaccgcggaaggcgttcaagagatcgactataaagatatcgctacgctgaaaaactacatcaccgaaagcggtaagattgtcccaagccgtatcaccggtacccgtgcaaaataccagcgtcagctggctcgcgctatcaaacgcgctcgctacctgtctctgctgccgtacactgatcgccatcagtaatcggtcacggtccattaatacgactttgagaggataaggtaatgcaagttattctgcttgataaagtagcaaacctgggtagcctgggtgatcaggttaacgttaaagcgggctatgctcgtaacttcctggtaccaaagggtaaagctgttccggctaccaagaaaaacgttgaatacttcgaagcacgtcgcgctgaactggaagctaaactggctgacgttctggctgctgcaaatgcacgcgcagagaaaatcaacgccctggaaaccgttactatcgcgtctaaagcaggcgacgaaggtaaactgttcggttccatcggtactcgcgacatcgctgacgctgtgactgcggctggcgttgacgtggctaagagcgaagttcgtctgccgaacggcgttctgcgtaccactggcgaacacgaagtgaacttccaggttcacagcgaagtattcgcaaaagttatcatcaacgtggttgctgagtaatcaggcattctcgtttttgctagcaacgaaacgtcggcccagcgccgacgttttgcttttttaaccccatcgcttttcgactggctatctccccctcttttcgcgataatcaaaaataaaacattattttaatttcttggtgaaagaatggatacccaacgccaggcctccccgtttgcccgcaaaaacgtcgtttatgtgtgtgccgcattttgttgcttgctatggggcagcgcttatccagccatcaaaagcggttatgacctctttcagatagccaccgatgatatcccttctaaaattgtttttgctggttatcgttttttgtttgcgggtgggttgctactactgttcgcgctgcttcagcgtaaaccgattggtcggtttcgtccgcgccagtttgctcagttgacgttactggggctgactcagacgtcgctgcaatatctctttttctatatcggccttgcgttcacctccggcgtgaaaggctcaatcatgaacgcgacaggcacattcttcagcgtattgctggcgcactttatttatcagaacgaccgattgagctacaacaaaacgctcggctgtattctgggctttgcgggcgtcatggtggtgaacgtcagcaacggcctggatttcagctttaatctgccgggagaaggctccgtggtgctggcggcgtttattctttctgcggccacgttgtatggcaaacgtctctcgcagacggtcgatccgatggtcatgactggctatcaattggggattggcggtctggtactggtcattggcggttacgtttttggcggtacgctgacgatacatggcttctcgtcggtggcgattttagtctacctgacgctgctctcgtcggtcgcttttgcgctatggagcattttactcaaatataatcgcgtggggatgattgcgccgtttaactttctgatcccggtttctggcgcggctctttcggctatttttctcggcgagaatatattggagtggaaatacatgattgcgctggtgctggtgtgttcggggatttggtgggtgaataaggtgaagcggtaatgcttcacctgaacgaatagggtatagacggggtaaggcgcagccggcgttactgtgcgcgaataaaactgccgtcaggctgacgcgtaaacagcacctgttgaccgttatcgccatctatcgttaaacctgtcaccaccccgctggcattctggcgaattttaatcatttgaccatttttgagattactcagcggcttgccagcgccttctacctgcgccattgcataaacgtctgtcgggggcagcccgtggtcacggaacagttgcgccagagttttaccagactctacccggtacgagcgccactgttgaccgatgccgctatcctgctggaaaggctgcgtctgcggctggttttgttcttccggctggccttcctggataggttccggcgcaacgggcgccacctgatccggatcgttttgcggcgcgaccagctgcgcctgaagctgggcctccgtcggcggctgtgattgcgattgcagatccaattgcgcttcccgcgtgacgacaggtgagtcgctggtctcgctggcgggcagcaggaaaccgatcaccagcacgatagcggcaatgataatgccacgacgatgcataggcggcagcggttccatgatgcgaaaattatccggcgcgtgccagattttcgccagggttggttttaattcaaagcgcccgggcatggtttacctcctgctccgcatctcgttccttaatcatagagtatagatggctaacgctatgatactggtagtgctatccgctttcgtgacatcaatacggataatctattgtttctttttccctgcgatttgtcatcctccctgagacaaagttttaccagaagaagcgtggctgttatgctgcccgctacttttttgatatccgatgaaggaaaaataatggccaccccgacttttgacactattgaagcgcaagcgagctacggcattggtttgcaggtagggcagcagctcagcgaatccggtcttgaagggctgttgcctgaagcgctggttgcaggcattgctgatgcgctggaaggtaaacacccggcggttcctgttgatgtggtgcatcgtgcgctgcgtgaaattcatgagcgtgcggacgcggtgcgtcgtgagcgtttcaaagcgatggcggccgaaggcgtgaaatacctggaagaaaaccgcgaaaaagacggtgtgaacagtactgagtctggtttacagttccgcgttctgacgcagggcgaaggcgcgattccggcgcgtaccgaccgcgtacgcgtgcattacaccggtaagcttattgatggcaccgtatttgacagctccgtcgcgcgcggcgaaccggctgaattcccggtaaatggcgtgatcgccggctggattgaagcgctgactctgatgccggtaggttccaaatgggaactgactatcccacaggagctggcctatggcgagcgtggggccggggcatctattccgccattcagcaccctggtgtttgaagtggaactgctggaaattctgtaagcgccccgggtttgccggatgatggcgtaaacgccttatccggcaaccctggcttcagcagatgccaatattttattttgcaaatggcgtcgttacgtgtatttttgtgagctaattcgcattatcaaagtgatataacactcattttaaacataaaattaacattgtatttgaatcttagtattcatcccgccgattcttacctaatatcgatgagtcctgataacaggatcgtcgtatcatagaccaaaggccgtagagcccgcacaacacagacaggtacaggaagaaaaacatggtagatcaggtaaaagtcgcagccgacgaacaggctccggctgaacagtcgctacggcgcaatcttacaaaccgtcatatacagcttatcgctattggcggcgctattggtaccggtctgtttatgggatcgggtaaaacgatcagtctcgccggaccgtcgatcatttttgtgtatatgatcatcggttttatgctttttttcgtgatgcgcgccatgggggaattgctgctctcgaatctggaatataaatcgtttagcgattttgcttccgacctgcttggcccctgggcgggatatttcaccggctggacgtactggttttgctgggtagtgaccggtatggctgacgtggtggcgattaccgcctacgcgcagttctggtttcccggcctttccgattgggtcgcctcgctggcggtagtgatcctgctgctaagcctcaacctcgccaccgttaaaatgtttggtgaaatggaattttggtttgctatggtcaaaatcgtcgccattgtggcgttgattgtggtcgggctggtgatgattgcgatgcactttaaatcgccgacaggcgttgaagcgtctttcgcgcatctgtggaatgacggcggctggttcccgaaaggtattagcgggttctttgccggtttccagattgcagtgttcgctttcgtgggcattgagctggttggtactaccgccgcagaaactaaagatccggaaaaatcgctgccgcgcgcgattaactcaataccgatccgtatcatcatgttctacgtctttgcgctgattgtcattatgtcggtgacgccgtggagttccgtggtgccggataagagcccgtttgttgagctgtttgtactggtgggtctgcctgccgctgcgagcgtgatcaactttgtcgtgctgacctcggcggcgtcttccgccaacagcggcgtcttctcgaccagccgtatgctgtttggcctggcgcaagaaggcgtggcgccaaaagcgttcgctaagctatcgaaacgcgcggtaccggcgaaaggcctgaccttctcctgtatctgcctgctgggcggcgtggttatgctgatggtcaacccgagcgtgattggcgcattcaccatgatcactacggtttcggccatcctgtttatgtttgtctggaccatcattctgtgttcatacctggtgtaccgcaaaaagcgtccccacctgcatgaaaaatccatctataagatgccgctcggtaagctgatgtgctgggtctgcatggcgttctttgcattcgtgctggtattactgacgctggaagacgatacgcgccaggcgctaatcgtgacgccgctgtggtttatcgcgttgggtctgggctggctgttgataggtaagaaacggatggcgggaatgcgttaattgttttgcccggtggcgctggcgcttaccgggcttacagcgtaacgttgatttggaggccggataaggcgccgtttacagccgccatccggcaaaatgcccggctggcgattattccccggccagcgcgcgtgggaacagcacgttattctccaggctgatgtgctccatcagatcatcaatcatctcattaatgccgttatacatcgctttccaggtggtgcaggcttctggcggcggcgttacatttttggtgacgtgtttgatgacgtctaccagctctcccgcctcgtcatgctcgctttccattacgcttatcgggcccgttgcctggcgacccataccctgtttgatcatggggaacaggatctgttcttctttcatcatatggctggaaagctcttcatgcagcgcggtgagatattttgtcaggccgcgtgggacgtttggcttatccgcgtggacgcgttccactttggttgcctgcagaataagctccggcagttgttcgcgatgtcggtcatgatagcgaacaacgatatggtcaataatgtccgccagcggaacggcgcgccagtctttttcgatgggctgttcagccaactgcgccagttgcgcttctatgatgtcaatatcgacgtcgtgacgcgcggcggcgcgcgccagcgtctgttttccgccgcagcagtaatccatatcgtactggcgaaacagcgccgatgcgcggggaatagagagcgccagttcgcctaaaggttgatcgcgataagccatagccgttacctcatttgcaataatataagttgtattttaaatgcatctttaaggcgaagctataactctttcggggtgcgtataatttaagcgagtatgaaattagcgttccgtgaccggaacgacggtcgctttttccggtttcgctctcacggcaatgaccacgcccgccaccaggagcgcaatgccgcttaacgtcaggaatggcgggatttcctggcgcagaatgaaggtatagagcagtcccgccaacgtctcaaaaacaatcagcggccctaaaataacggttggcaatttttggctggcgatattccagcacagcgcgcccacccaggaacacagcaccgcgatggcgatcatcagaccgataaacagcgcgggatgcgggccaaagggcagggtaaacagcggtttctggatactcagccacagacagaccgccgcatagccgattaacgagaccggcagcgtaaccagcgcctgcgccgttgcccacatcatgggatgtttgtcgggattttcccgcagccagcgggcgttgcgcagcgcataccatgcccagcacgctacggaaatcagcgccagcacaatgcctgaaccatagcgccagccgctaacatcggacaatccctggctaagttcagcaatattgacgcacagcaggccaaaaccgataagcgccagcgcgggcgctaaacgccgccaggataatctgccgtctcgttggctatagagaacgttagcgaaaagcggaatgacgaccggcaatgtcccgatgatcatcgtcgacaccggcgcgccggttcgctgaatggcgctggcgaggcaggcgtaatagattacattgcccatcagggtcagcgacagggcggtggaccagtctttgcgcgttaactggcgtaaccgcgtgcggcctaaccaggcaatcggcagggcaatcagccccagcgccagatagcgtcccattgactgtaagagggccgggtaatccggcacgattaacgggccgacgaaaatcaatccccacattagccctgccagcagggcgtatagcacgccgctaatcatcagattctcctcataaaccgttccgtcattatcagagaaggtctatgaggatgccacataaattaactaaattttaacatttacagtacggagcgaaggctttctgtgagcgtcgtcgtcgggcgaccgatgagtttacgcagcgtatggctgtcatcaaacaggccgcctttcgccgcgccagcgtcagaattggccaacatatccgccagtccgtcaggcaggcctgcgcctttcagcgcggcggcaaaatcgacttcgctcaggttctggtagacgattttttttccgctttgatgagtaagttcatccgccaactggcttaatgtccaggcgtcatcacccgccagttcgtagacattcccggcgtgaccctcttcacggatgacgcgcgcggcggcggcggcatagtcagcgcgcattgcggaggcgattttcccttctcccgccgcgccaataaagacgccatgcttcagcgcggcagggacgctcgccaggtagttttccgtataccagccgttacgtaatagcgtgtgaggaatacctgactcagccagcatcttttccgtttcaatatgttcatcggcgagcgccagcggcgatttatccgcatgtagcaggctggtataggcgatgaatttcaccttcgcggcaatggcggcctgaataacgttgcggtgctgcgcggtgcgttgtcccacttcgctggatgatataagcagcagtttatcaacgccctgtaaggcggtggtcagcgcggcttcgttagcgtaatccgcctggcgaacggcaatcccgcgctgactgagcggggcggcttttttcgggttacggacgatcgcgacgaggtggctggcgggcgtcgtttttagcaggttttcaataacgtgttggcccagttggcccgttgcgccagtgatagcaatcatggtgaactcctcagtgttggtcttgtgttttattacgctaccacctaaacttacttttagtaagtacgtacaaaaaggtaagtatcaatgcgcgctcatactctttcccggcagttgcgtgaaggcaatctctttgctgaacagtgcccgtcccgtgaggtgttaaaacatgtcaccagtcgctggggcgtactgattctggtggcgttacgcgacggtacacaccgttttagcgacctgcgccgcaagatgggaggcgtgagtgaaaagatgctggcgcagtcgttacaggcgcttgaacaggacggatttcttaaccgggtgtcatatccagttgttccgccgcatgtggagtacagcctgacgccgcttggcgagcaggtgagtgataaagtcgccgcgctggcggactggatagaactgaatttgccgcaggtattggcgcagcgggaacgtttatcagatggcggctagcgctttattcggcctgccagtcaggccgaataaacgcagcgccatacgggacacacgttacttgcttaaatccacctgataaatggcaaaaccgatatcatcgacggcaaccttcttcatcggatactgccctttcgctttaatgaaggcagcggctttatcgcctggcgatgtttcaaagcggatatccagcgccgtatcgctgtggattggcgccagacgccagttattatccgccgccggatggatttcgcccgcgcgttttgactctgcgccaatccatgccgccagcacggcgcgattttcatccggagacgcaaaggcgatatggctgtcgcccgtgccggcaaacttgccgccgtaagcgcgatagttattcgtggcgaccaggaacgtagcgttcgggtcgacaggcttaccgttaaaggtcaggtttttaatacgttccgcctgcggattcaccatctggcattcgccatcatagcgggcgggctgtgacacatcgatttgataattcacgccgtcaatgacatcgaaattataggtgcgaaagccatcccaattgatcaacgattgcggtttgttgctgtgaatatcaatctgattaaattgtccggcagaacattccagccactcttttacctccttgccgctggctttcaccaccaccagcgtattcggatagagataaagatcggcggcgttacggaaggtcaactggcctttttccacctcgacaaagctggcaggatcgttcttacgcccgccaactttaaacggcgcggcggcggacagcaccggcagtttcgccagatccggatcgccctgaataaagtgttccacatacgctttttgcgcgttattcaccacctgtacggtaggatcgtcctgcaccagagcaagataactgtacatattatcggcggatttaccgatgggcttgctgacaaactcgcgggtggcatcgtgatcggctttcagaataccgaccagcttactgtcttccgccgccagcgactttttagcggcggcgtcatagataggccgcgcttccgctttcgcctgcgtaacctgccatttgccgctgtcgttattgagcaccagatcgaccactcccagatggtcgccccacatgccaggcattaccgcaggaatgccgttaagcgtacctttggcgatatccgcgcctttgatgtcggcaaaatctttaccggggaagacggcgtgagcgtggccaaacataatcgcgtcgacgccaggaacttcgctgaggtaataaaccgagttttccgccatgctgtggtacggatcggcagaaagacctgaatgagcaatgactaccacgatatcagcgcctttctcgcgcatttcgggcacatatttccgggcggtttccgtaatgtcattgacggtaactttgccgctcaggttcgctttatcccaaatcatgatttgcggcggaacaaagccgatatagccgattttcagagtttgcgggttgccgtctttatcaataacgctcgtctctttaatcagataaggcgtaaagagcggcttttgggttttaacgtcgataatattggcgttaacataagggaatttcgcgccagccagcgcgttatgcagatagtccagaccataattaaactcatggttgccgaggtttccaaccgcgtaatccagagtgttgagcgctttatagaccgggtgaacgtcaccgtctttgagcccttttgccgccatataatcgcccagagggctcccctgaatcaggtcgccgttatccaccagcacgctgtttttgacttcatttcgggcggcatgaatcaaacttgcggtacgtaccaatccgaatttttcggttgcggtatccttgtaataatcgaaatccatcatgttgctatgtaaatcagtagtttccatgatacggagatcgacggtggccgcattcacgctggcggcgatcagcgtagccagaagcgttgcactaaacttaatcatcagaggcaccttttaagagcgcaatagaaaagccggatagtgaaaaatagcgatgacaaacagtgaaacccgatatcgttccaaccgtcgccagaagaaggcgaaaccgccccatccggccgattttttgcgagtgttcacagaaaggtgaatcatgccatgaaagctattatcaaaaccgctgacggtatcacagttggcggaacccttaacgatcgggtataagtaaaacaacgagttaacgcccccgtcataaagaggtggagaatgttagaacaagtatgccagcttgcacggaacgcgggcgatgccattatgcaggtttatgatggagccaaaccgatggagtacgcccgcaagcaggacgattctccagtcactgcggcggatatcgccgcacataccgtgattctcgaagggttacgcacgctcacgccggatattccggtgctttcagaagaggatccgcccgcctgggaagtgcgccagcactggcagcgttactggctggtcgatccgctcgacggcaccaaggagttcatcaagcgcaatggcgaattcacggtcaatatcgcgctgattgagcagggcaagccggtgttgggcgtggtctatgcgccggtgctgaaagtgatgtactacgcggcggaaggtaaggcctggaaagaggagtgcggggtgcgtaagcagattcaggtccgggatgcccgcccgccgctggtggtgattagccgttcgcatacggatgatgaactcaccgaatatctccaacagcttggcgaacatcagacaacctctattggttcctcgctgaaattctgccttgtggcggaaggccaggcgcagctttaccccagatttgggccgaccagcgtctgggacactgccgcaggtcatgccattgccgttgcagccggggcgcacgttcacgactggcagggaaaaacgctggactatacccctcgtgaatcgttccttaaccccggcttccgggtgactatttactgaggagcttatgcagcaggtcgaccacctgctgtacctcttgctgggttaacgcgccatctttcacccattgaacccgaccgtctttgtcaagcacgatgacggcggacccctcttcttttaattgccaggcgttacgcgccacgccattgctgtcgacaataaattgcgaccacgggtagagctttttattactttctatactgctacgcacgaacataccggagcctgggatcgcatcatcggtgttcacaattgtggtcgtctggtatctgtcatgcgggagcttggctgatttaatcgcttcaatcagcgtggcgtttttttccttcgctgacgttcgacccgcaatgtgcagcaggacgcgcacttttcccgccagctgcgcgctattccagtttttataactaaactcatctttattcaacgtcagttcgccacggtcggcaatgcctaccggcggcacccgttggttaacttcaaggttatgcgcacaagccattatggggagtagcagacacgacatcgccagaattttacgtaaggtcatggtcattccttctttatttttttgcaggtgatccgaccactttgggccgatagttaatcatatgtgcgattgatgctttttcccgcaaaggggatgccagtttgcgggcgggcgcacacttcctgtgaaaaatgaaggcatatactgagaaaaatgagctgatgtttagataattctgaataactgtaatcaaaaggtaaatatacttatgcacactggaaacgacgtagatatggtctatagtcatatggcattaaaatttgcgccttaaaactgttgggccgattgtggcatcgcaagggcgtaatactctgcaggagacaacaatgaaaattttccaacgctacaacccgctacaggtggcgaagtacgtgaagatcctgttccgtggacggttatatatcaaggatgttggcgcttttgagttcgataagggtaagattcttatcccaaaagtgagagacaagcagcacttgtctgtgatgtctgaagttaaccgtcaggttatgcgtctgcaaactgagatggcgtaaccaaaagtgctatgcagtaggttaaaaaagtaaaaaaaaacggctcctgaatcaggagccgttgatgtttctggcaaacggatttcaggccgcgctgtcttctttaccttgcgcatcgggcagtttcggcgccggtacgttgcttttattgtcgagacgcgtcaccagcaactgatcgatacggtagttgtcgatatccaccacttcaaatttgtagccggaaaacttcaccgaatcagtacgttttgggatcttgcgcagcataaacatcataaagccgccaatggtttcatagttgccggattgcggaaactcatcgatatccagcacgcgcatgacgtcgtcaatcggcgtgccgccgtcaaccagccaggaattttcatcgcgcgccacaatttgctcttccagtccctggccgaccaggtcacccattagcgtggtcatcacatcgttcagcgtaatgataccgacgaccagagcgtattcattcataatgaccgcgaaatcttcgcccgccgttttgaaactttccagcgcctcagaaagggtcagcgtatccggcacaatcaaggtattgcgaatttgcacgccgctattcagcgccatactttggttagccagcacgcgattcagcagatctttggagtctacatagccgatgatgtggtcgatatcttcattacacaccaaaaattttgagtgcggatgttcggcgacctttttcttcaggctttgttcgtcttcgtgcagatcaaaccagatgatactttcgcgcgacgtcatagaagacggtacggtgcgagattcaagttcaaacacattttcaattagttcgtgctcttgcttgcgcaagacgcccgccagcgcgccggcttccaccactgcgtaaatatcatcagaagtaatgtcgtctttccgcaccattggaattttgaacaggcggaagatgttgtttgccatgccgttaaacagccacaccagcgggcgaaaaacgaacaggcagaagcgcatcgggttgatgatacgcaaagccacagcttctggcgcaatcataccgatgcgtttcggggttaaatccgcgaacaggataaacagccccgtcaccagcgagaaagagagaataaagctcagctgctcggagagttctggcgacatatagtgcgagaagagggcggaaaaggcgggcgaaaatgccgcatcgccgacgataccgccaagaatagcgacggcgttcaggccaatttgcacaacggtgaaaaacatgccgggattttcctgcattttcaatacgcgttgtgcgttgatactgccttcatcagctaataacttaagtttaatcttacgtgatgcggcaagcgagatctcggagatggagaagaacgcacttacagcgatcaggcagaatataatgaatatactgtttaacatatcttatccggcgaaacgccagatcctcggaagggaagtttataaatccgtgtggtaacgtttaatgaaaaccggctcgtagcagtgagccgataagttcagggctagtatagcgtaagctactgtaaagtcgccagagggttcattttcaactccgacaagttccccctacgccagcgtcgtcacgcgtcaggcggcaggcaaacgccgatcccgccaatcccgcagtaaccatatggatttttgtgcagatactgttggtgttcatcttcggcgtagtaaaacggcgtcgcatgggcgatttccgtggtaatagggcgatggtctccggcggcggtcattgccgactgaaagcgctcgcgactggcgtgagcggcggcattctgttccggcgttaagggataaatcgcagaacggtattgcgtaccgtgatcgttaccttgttgcatcccctgcgtcggatcgtgattttcccagaaggtctgtaaaagctgctcataactgataacggcaggatcgtacactatccgtaccgcttcggcatgaccggtctgcccggagcagacttcccggtaggttggattaggcgtgtaaccgcctgcataccctgccgcggtgctatatacgccgggcaattgccagaataaacgttctacgccccagaaacagcccatagcgaagtaggcgatctccatcccggcagggacattggtcatagagtgttcatttaccgcatgcagagtggcgatcggcatcggggtgttgcgtcctggtaacgcatctgcttgagtaaccagatgttttttatcaaataaactcatgagctattctcccgaaagcgttaattggcgttaaggttgtaacgagacgcatctttgcacacaataacaacattaatgtatctggatttaaccataagaaatatttgggcagtcgtctgcttttcaatcgaaattgttgattttatgttaagccgcggagcggtagtgtgattttttccaggggtgggaataggggatattcaggagaaaatgtgccacatatccgtcagttatgttgggttagcttactgtgcctgagcagttctgcggtagccgcaaatgttcgtctgaaagtcgaagggctatccggagagctggaaaaaaacgttcgcgcacagctctctacgattcagagcgatgaggtgacgccggatcggcgctttcgcgcccgagttgatgatgcgattcgcgaagggcttaaagcgttaggctattacgaacccactatcaaattcgacttgcttccaccgcctgcgaaaggacggcaggtattaatcgccagggttacgcccggccagccggtgttgattggcggtacagaagtcattttacgcggcggcgcgcgcacggacaaagattatctggccttactgaaaacgcgtccggcaatcggcacggtgctgaaccagggagactatgacaattttaaaaagtcgttaaccagcgtgtcgctacgtaaaggctatttcgacagcgaattcattaaaagtcagttgggaattgctctgggccgccatcaggcgttttgggatattgattatgatagcggtgagcgctatcgcttcggacctgtcaccttcgaaggttcgcagattcgtgatgaatatttacaaaatctgttgccgtttaaagagggtgatgagtacgaatcgaaagatttggcggaactaaaccgccgactttccgctaccggatggtttaattctgtcgtggtggcgccggaatttgagaaatcgcgtaaaacaaaaattctgccgttaaaaggcgtggtatcgccgcgaaccgaaaacacgattgaaaccggggtggggtactccaccgacgtcgggccgcgcgtgaaagcgtcgtggaaaaaaccgtggatgaactcttacggtcatagcctgaccaccagcaccagtatttctgcgccggaacaggtgctggattttagttataaaatgccgctgctgaaaaacccgctggagcaatactatctggtacagggcggttttaaacgtaccgatttgaatgatacggagcaggactcgaccacgcttgccgtgtcgcgttactgggacctttccagtggttggcagcgggcgattaatctgcgctggagtttcgaccactttacccaggggaacgtcaccaataccaccatgctgttctacccgggcgtgatgatcagccgaacccgctcgcgagggggactgatgccaacctggggcgattcgcagcgctattcagtagactattcgaatacggcctggggctccgacgtggatttctccgtgctgcaggcgcaaaacgtctggattcggactttgtacgatcgccaccgttttgtgatgcgcgccaatttgggctggatagaaaccggtgatttcgacaaagttccgccggatttacgtttcttcgccgggggcgaccgcagtattcgcggctataaatacaaatctatttcgcctaaagatagcgacggcaatcttaaaggcgcctcaaaactggcaaccggatcgctggagtaccagtataacgtcaccggtaaatggtggggggcagtgtttgtcgatagcggcgaggcggtgagtgatattcgccgtagcgatttcaaaaccgggaccggggtcggcgtgcgctgggcgtcgccggttgggcctgtcaaactcgattttgccgtaccggtcggcgacaaagacgaacacggtttacagttttatatcggtctggggcctgaattatgagtttatggaagaaaataagcctcggcgtgttgattttcattgtggtgttactggcgagcgttgcgtttctggtcgggacgacgacggggctgcatctggtattcagtgcggcgaaccgctgggtgccggggctggagattgggcaggtcaccggcggctggcgggacttatcgttaaaaaatatccgctatgagcagccgggcgttgcggtgaatgcgggcgaaattcatctggccatcgggcttgattgcctgtggcgcagtagcctgtgcgtcaatgatctggcgctaaaagatattaatgtcgctatcgacagcaaaaaaatgccgccctccgaaccggcgcaagaagaggaagaaagcgggccgctgaacctctccacgccctggcccatcacgctgtcgcgcgtggcgttgaataacatcaatatcaagattgatgacactaccgtttcggtgttggattttacctccgggctggcatggcaggagaaaaacctgaccctgaaaccgacgcggcttcagggactgctgatcgcgctgccgaaggtcgctgacgtggcgcaggaagaggtggttgaacccaaaatcgagaaacctcaaccggatgaaaagccgcttggcgaaacgctaaaagatctgtttgcaaaaccggtaatgccggagatgaccgatgttcacctgccgctcaatctgaatatcgagtcatttcgcggcgagcagctacgcatcaccggcgataccgatctgacggtgcgcacgatgctgcttaaagtcagcagtatcgacggtaatatgaagctggatactctggatatcgacgccaaccagggcacggtgaaagcctccggtacggcgcagctcgccaataactggccggttgatattacgctcaacagtacgctgaatatcgatccgctaaagggtgaaaagataaaactcaaggtcggcggcgcgttacgcgaacaactggaggtcggggtgaacctttccgggccgatggatgtcgcgcttcgcgcccagacgcggctggcggaggccggtttaccgctcaatcttgaagtcgtcagccaacgcattgcctggccattgacgggtgatacccagtttcaggctgacgatctgaagctcaaactgagcggtaagatgaccgactatacgttgtcgatgcgaaccgccgtgaaaggacaagatattccgccggcgaccatcacgctggatgccaaagggaatgagcggcagattaatctcgataaactcaccgtcgccgctctggagggaaaaaccgaactgaaagcgctggtggactggcagcaggcgattagctggcgtggcgaactgacgctgaatggcatcaataccgctaaagagattccggactggcccgcgaagcttaacggcgtcatgaaaaccaaaggcagcctctacggcggcacctggcagatggatgtcccggagctcaagctgaccggcaatgtgaagcagaacagcgttaacgttaacgggacgctaaagggcaacagctacatgcagtggacgatcccggggctgcactttgcgctgggcccaaacagcgccgatataaaaggcgagcttggcgttaaggagctgaatcttgacgccgccatcgatgcgccagggctggataatgcgctgccaggactgggcggcatggcaaaaggaatcgttaaagtccgcggtacggtagaagcgccgcagctgttggcggatatcaccgcccgcggcttgcgctggcaggagctgtctgtcgcccaggcgcgcattgagggcgatattaaatccaccgatcagatagcgggccatctcaacgttcgcgtagagcggatttcgcagcccgacgttaatatcaatctggtgacgcttgacgccaaaggcagcgagaagcagcatcagctacagctccgtgttcagggagaaccggtatccggtcaactctccctgacaggcagcttcgatcgcgaggcggcgcgctggaaagggacgttaagcgacacccgtttccagacgccagtggggccatggtcgttgacccgcgcgattgcgctggactaccgtaataaagaacagaaaatcagtatcgggccgcattgttggctgaacccgaacgccgagctgtgcatcccgcaaaccattgatgcgggcgccgcaggacgggcggtggtcaatctcaaccgctttgatctggcgatgctgaagccatttatgcctgataccactcaggccagtgggatctttagcgggaaagcggatgtgtcgtgggacaccacccaggagggattgccgcaggggaaggtcacgctttccggtcgtaatgtgaaggtcacgcagaccgtcaatgacgcgccgttaccggtcgcgtttgagacgctgaacctcagcgccgatctgcacaataatcgcgccgagctgggatggctgattcgcctgacgaacaatggtcaattcgatggccaggtgcaggtaaccgatcctcaggggcggcgcaatctcggcggtaacgtcaacatgcgcaatctcaatctggcgatggtcaaccctgtcttttcgcgcggcgaaaaagcggcgggaatgttaaacgccaggctacgtctgggcggcgatgtgcaaagcccgcagttgtttggtcagttgcagcttagcgcgctggatattgacggtaactttatgccgtttgagatgcagccgagccagctcaccatgaactttagcggtacgcgttcgacgctcgccggtatcgtgcgaacacaacaagggcaaattaacctgaacggcaacgccgactggagtcagattgacaactggcgcgcgcgggtgacggcgaaaggcagccgggtgcggattaccgttccgccgatggtgcgcctggatgtctcgccggatgtggtctttgacgcgacgccttcgctgttcacgttggatgggcgtgtggacgttccgtgggcgcgaattgtggtgcacgacctgccggagagcgcggtcggcgtctccagcgatgtggttatgctcaacaatgacctgcaaccagaaacgccgcagacagcgtctattcccatcaacagtaatctgacggtccacgtcggcaacaacgtgcgcatcgacgccttcgggcttaaagcgcgtttgaccggcgatttgaaagtcgcgcaggataagcaggggctggggctaaatggtcaaatcaatattcctgacggccgattccgcgcctacggccaggacctgcttgtccgtaaaggcgagctgctgttctccggcccgccggatcagccgctgctcaatatcgaagcgatccgtaaccctgacgccaccgaagacgatgttattgcgggcgtgcgcgtcacaggcacagctgatgaacccaaagcggaaatcttctccgatccggcgatgccgcaggctgaagcgctttcttatctgctgcgtgggcaggggttggacagcaatcagagtgatagcgcagcgatgacctccatgcttattggcctgggggttgcgcaaagtggtcaggttgtgggtaaaatcggagagacattcggtgtaagtaatctggcgctggacacgcaaggggtgggcgattcgtcccaggttgtggtcagcggctatgtactgccgggtctacaggtgaagtatggtgtagggatatttgactctctggcgacgctcacgttacgttatcgcctgatgcctaagctatatctggaagcagtgtctggcgtagatcaggcacttgatttgctctatcagtttgagttttagcaatgcgaatatttgtctatggcagtttacgacagaaacaaggcaacagtcactggatgaccaatgcccaattgcttggcgattaccgtatcgatgactaccagttgtatagtctgggccactatccaggcgcagttccgggaaacggagcggtatacggtgaagtttatcgaattgataacgccacgctggccgaacttgatgctttgcgcaccaggggcggtgaatacgcacgccagttaatccagacgccttacggcagcgcatggatgtatgtatatcaacgtcctgttgatgggttaactctgattgaaagcggtgactggttagacagaaaccagccctgaactgaacacgccaccctcgggtggcgttgttttttacattctggctgatggcgctagcgccgggcatggtgagctcttattctgccgtagatcaataatgacgcgccgcccaggataacaatgcatccgagaaccataaatccctgcatgtagctgccggttgtccggtaaaaatagccgaccataaggcctgccaacgtaccgccgccgccggcgccgatgccattaataataccggaggctgggccaatcgcatggggtttaacgttcgactggataatcgaccagatattgggggtaaagctggcggcataataacccatcgccagggtaatgagcgtgattttaaagcccggcgcatcgacaaatggcaggagaaataacatcacgccggggattagtaggcccagtgaagcaataagtacacgtttttgtgtcttatcactgatccatgagatagggattgccagtataaccgcagtcagataaggcagagaactgaccaatgctttactgaatccggtatagccgagagaattgacaaccatgggtatccataacgtaattccccagaacaacatcccttgagtgatgtaggtaaaaataaggagtaggaagggggttccgcccagcgattccagggtaagtttagttttctctgttggcgccggcgcacgataataaggcgcttcttcctgttttttcagcattgttatataaagtggaaccacaacaacaatgccgatcacaccagtgataataaaaacatttcgccaaccgaaggcagcatccagcggggacaaaatcataaatcccaggcctaatgccaggaactgtccataatactggataatgctgttcgcctgcgtccgttctttgtctgaaaaccagtcgctggcgaagcgggactgctgcggccaataaatgccttcggtaatgccaagcaccagccgacaaatcaaaataacgtacactgacgaggtaaatccgacaaaaacggtcgcaatcgaccagattagcaccatcagaatgactatttttttcggatcgtatcgctgggtaaatacgccgccaaaaatatttgaaaaggcatagccaataagaaatatggttaatacaatgctggccgttgcgccatcaatattcaggtcgtgtgtaatcgtaggtaacgtaacggaaagattagaacggtcaagataagcaacaaaaaggccgaacattaatgtcgcgccgatccgtagccatttttgcattgaggtcatttttcaactccgtttggccgcgcgccaaaatcaatttgacgaaataatatctcaccggattttatggtcatttgtggtaccagcacatgcgtccccgtgagcgtttcaccatgaatatcggcaaattcaacatgcctgttttttaatttaaagatggcgatatcggcaaatgccccaggggccagcgtaccaatttctgctgccatacccattaaaactgctggggtatgggtacaggcgttaatgacatcggtaagcgcgacgccgagtgctaaatatttcgataaaatccatggtaaggcgtaaacaggccaggcgagtttagtgatggttgagagatcgctactgatgatatccggaagaaagccattggcgatggcccggcgtgccgtgttcattgaaaaatggctgtgaccattggcggcatcaaatataacgcctctttcccttgcctgacggacttcggctaagaccacgccttcatcagtaagaatggtgctacctttgccgtgaaacgcatgagcgataatatcgcctcggcgtagcaaggagacaagttctttcatgggaacgacgggatgagtcgagtgtattgccacgggacactttaaatcgttggcaatacgaagggattcagtcagcggttttaagccatattcagcaatgtcctcagtctgaaccttgagttttaatccctgaagaacgttgcgatactgacgaaacagcgcgtggatcttattttcatcaatattgtcaggatcataattttcttgtgaccaggtttggcccggcggcgacacggtcaaaaacgctttgattcgaactttgctggcgcaaatcaccgttcggtagaaggcatcaaagtttgccgtaccggcagaacctgcatccacgacggtggtgacgccattcggcggcatgtacatatcaggcctgacgccgccttccgtcgcgtcataaaaaacatgcgcgtgataatcgataagaccgggagtaacgatcatgccgtcggcatggataatccgggtctccgaagttacaggatatttatcggcatcaacgataatatcgttaatgatgcgtaaattgttaatctcattaatattacgagcgggatcgatgatatgtccaccggtaattaatatatcatttttcatcataatctcttaaaatagtaaataattatggcagcccttaaaaatatattaaaaagtgtgttttgagcggatgttatgttggattaaaaatacggttattggtagggagagcttaggataccttattaaaaaggtaatcgggcttatgcactaaataagactttagcgcttgctaatatttagggcgtaagtccatgggagtctgggagcattcacaaaacaattattatcttaagctttttagagaaaccgtgagcgtattcaaccctttttaataaaaaatcaggtaaagtattattcattccgtgaatgttaaattaataatgataaaaactgtgttctattcattagccaataaaaaggccctcattactatgagagcctttatcttgacgcttatgtaaaagcgaacttatttcttcgctgcgcgctcgaaggaggcaacgatttccgctttagccgcttcggcgttgtcccaaccgtcaactttcacccatttgcctttttcgagatctttataatgctcgaagaaatgagtgatctgcgctttcagcagttccggcagatcgttcacatctttaatgtgatcgtactctttgctcagtttggtgtgcggtacggcaaccagtttcgcatcttcaccggattcgtcggtcattttcagtacgccaaccggacggcaacggatgacggcgcctggctgcagcgggtacggcgtcgggaccagaacgtctaccgggtcgccgtccagagacagggtatggttgatgtaaccgtagttgcacggatagaacatcgctgtggacatgaagcggtcaacgaacagcgcgccgctctctttgtcaacttcgtatttgatcggatctgcgttagccgggatctcgataacgacgtagatatcttccggcagttctttacccgccgggacgttgagtaagctcatgtctgtttcctttgaatttatgacaaacaagtggcgagtattatagccaactcacgccgaaagtcttcgcttgttttcgtttccgcctcatctggcgcgtcgttgcggagcataaacgacaaaggttaagaaccggaaaaatcacgggcctgataaggcaacgccgccatcggacatgttattgcccaatggcggcttcatgcgttattccgcatggtggtaaaaattacgcgtccgggtattcgcggataaagcgttccacatcgtcaaccatatggcggttgccgacgaagaacgagcggcgctggtgcaggctttccggaatgatatccagaatacgttctttaccatcgcttgctttgccgccggcctgttccgcgaggaacgccatcgggttgcattcatacagcagacgcagtttcccctgcggatggctggcggtgctggggtagagatagatgccgcctttcagcaggttgcggtggaaatcggccaccagagagccaatgtaacgtgaggtataagggcgacttgttgaactatcctcttcctggcagaatttgatgtacttcttcacgccattcgggaatttaatgtagttaccttcgttaatggagtaggttttacccttttccgggaaacgcatacgttcctggcacagacagaacacgcccaacgacggatcgtaggtgaaagcgtgtacgccgcagccggtggtgtaaaccagcatggtggacgagccatacacgacatatcccgcagcgacctgtttgttgccgggttgcaggaaatcttcttcggtgaccggcgtgccgacgggcgtcacgcggcgataaatcgagaaaatcgtaccgacagagacgttaacgtcgatgttagaagagccatccagagggtccatcagcaccacatatttcgcgtgttcgcagccttcaaagacgacaatttcgtcctcttcttccgatgcgatgcccgctacaatatcgcgcgcttttagtgcagctttcagtttctcgttcgcgaacagatcgagtttctgctgaacctcgccctgtacgttctcagcaccgctggcacccaggatatcgaccagaccggccttattgatatcgcggtggatgatcttggcgcccaattttattgccgacagcaaagcagtgagctcaccggtagcctgagagaactcgtgctgcttttcgacaataaattcacctaacgttttcataacactttccctgcaattgattggagtaaagcgaccgtaacaatcttaacaaacatttcagatgatgcgctcaggtgaatcgcgccagcaaagtacagatttacctgaaatgcgtttctcacttgccagacatgtgcgtaaaatggctcgcagataaaaaaaggatagtgacgtatgcgcattcatattttgggaatttgtggcactttcatgggggggctggcgatgctggctcgctcgcttggtcatgaagtaacgggttcggacgccaatgtgtatccgccgatgagtaccttacttgagaagcaaggcattgatctgatccagggttatgacgccagccagctcgatccgcagccggatctggtgattatcggcaatgcgatgacgcgcgggaatccgtgcgtggaagcggtgctggaaaaaaacattccctttatgtctggtccacagtggctgcacgactttgtgttgcgcgaccgctgggtactggcggtcgccggtacccacggcaaaaccacgaccgcaggcatggcgacctggatactggaagcgtgcgggtacaaaccgggctttgtgattggcggcgtaccgggcaactttgaggtttccgcgcgcctgggagagagcccgttctttgttatcgaagcggatgagtacgactgcgcgttctttgataaacgttctaaatttgtgcattactgcccgcggacgctgatcctcaacaaccttgagtttgatcatgccgacatcttcgacgatctgaaagcgatccagaagcagttccaccatctggtgcgcatcgtgccggggcaggggcgcatcatctggccggaaaacgacatcaacctgaaacagaccatggcgctgggctgctggagcgagcaggagctggtgggcgagcagggacactggcaggcgaagaagctgactacggatgcttccgagtgggaagtgtggctggacggcgaaaaagtcggcgatgtgaaatggggcctggtcggcgaacataacatgcacaacggtctgatggcgattgccgccgcgcgccacgtgggcgtcgcgcccgcagaagcggccagcgcgctggggtcatttattaacgcccgccgccgtctggagctacgcggcgaagcgaacggcgtgacggtgtatgacgattttgctcaccacccgacggcaattctggccacgctggcggcgctgcgcggtaaagtgggcggcaccgcgcgcattatcgcagtgctggagccgcgttctaacacgatgaagatggggttatgcaaggatgacctggcgccgtcgttagggcgtgcggatgaagtgttcctgctgcagccgccgcatattccgtggcaagtggcggaagtcgctgaagcctgcgtacagcctgctcactggagtggcgatgtcgatacgctggcggaaatggtggtgaaaaccgcacagcctggcgatcacatcctggtgatgagcaacggcggtttcggcggcatccatcagaaattgctggatgggctggcgaaaaaagctcagaacgtaacagcgtattaaatgactatgcggtcagccagccttgtggctggctgttttatatggggcatcttgccatcgaaagcgcattccgctcgccgggagacgttaaagcaatactgaaaaatcatttgccgctcagtattgaaaaagagtagacgcatatccttaaagtaatcagtgtaatacactaagagtgttccgccggttgccgtatgcgggacgaaaagagccagttcgcaataacagatgaaggtttcgtgatttataaacgtcatcttctgcctttcaacgtttgcgatgccgcctggctgcgggcatcgtccagtcataacaatgctgatcctgtcgcatttatgcggtcagattcagattgctcagaacccagcccgccagcaaattctgtactgaaggtaaccacagcgcaatttgaatgttgttaactgtatgttcagttcatttgtgctaatatggttatttacgaaattttcgttctattagagtatcatgcatgtctaaacatcaaactcaactttccttactgcaggatgatatccgcagtcgctatgacagccttagcaaacgtcttaaacaagttgctcagtatattctggataacagtaatagcgttgcttttgacacggtagcttccatcgcgcaacatgccgatgttcccccttcgacactgattcgttttgctaatgcgtttggttttagcggatttaatgaaatgaaacaggtatttcgccagcacctgatggaggaaacagtaagctataccgagcgggcgcgtctgttcagacagaaaaatgcggatgaaggggaacctaccccggaaaagccgggtgaaattctgaagctattttcaatggtgaatgcacaggtattacaacaattaccggtgcagattaaaaatgagcagttggatgcggcggtaaatctgttagcgaaagccgacaatatttatgtgattggattacgtcgttcgtttagcgtggccagttatttaacctacgcattgcgtcatctggagagacgggcatttttaattgacggtattggcggaatgttctctgaacagctaagtatggtcagccccgacgatgtcgttattgccatcagctactcgccttacgcgcaggaagtggtggaattagtcgagcttggcgcgaaacgcggtgcgcaccatattgcgataaccgatagccaggtcagcccgctggcagcgttcagtgaagtctgttttgtggtacgtgaagcgcaggtcgatggtttccgttctcaggtcgcgtccatgtgtctggcgcaaacgttagcggtttcactggcgctggcgacggagtaaaaaaacaagccgatgatcgtatttagcgatcatcggcattgtggtgaaacttaatcagaataacgttcggtttgaattggctgcagtttttttctgcgttttgctaacactacgctctccattttctccagcgaaatgccttttgtttccggcaggtaacggcagataaagaagtaactgaagatgcagcagatggcaaatatccacattggaaatgcgccgtggaaatgcgaaagtaaatacgggttttcattaatcatcgggaagaattgcgaaactaaaaagtttgccatccacataaatccgaccgaaatactcattccctgcgacctcatccggttagggaatatttcagaaataagcacccatgcgcccacgccccaggaaagcgcgtagaaaatcataaagaacagcataccgaatagcgcgaaataaccggttgcctggctgtacagcgcccatgaggtgagcaacaagccgatgatgctgccgatagtgcctttacgcatcagcgacaaacgccccatcttatccataatcattgcgccaataatggaaccgataagctgaatcacgccgatccagattgtctggaacagggcctcctgggcgctaccggtcacatccttaaggacgattggcgcgtaatacatcatgacgttaacccctgttacctgttgcagcatagcgatcatgcagcccaggatcaggatgaaacgcacgttcccgtcgcggtaattgagtttttgatgggcgtttagttggtcattttgcagtgaggtttttatatcggcaagaagatgtctggcatgttcttcgttggatattttggtcagtatttttagcgtctcctcctcgcgaccaatcatcatcatccagcggggagattccgggattaaaaagactaaaatacagaacaaaatgcagggaataatacccgcagcaaacatatagcgccagccaagttcaatgagccaggtatccgctgcaatcgatgctattttgtagttaacgtagaagatcagaatctgaccgaaaacgatagcgaactgctgcatacttaatgctctgccgcgcatgtttttcggtgagacttcagacatatacatcggtgatactgttgccgccaggccgactgccagtccaccgataatgcgataaatcacaaaatgggtgaacgtgtaggagagggaggtgcccactgcggaaatagtgaataacagcgctgaaaccatcaatgatttcttgcgtccaaaacgtttggataaatatccggcgctaaacgaaccaataacgcaccccaccacaacgcaggaaaccgcccagccggtctcagcaggagatagatgaaagtagctggtcagtgaaccaatcgcacctgaaataacagcagtatcgtagccaaataatattccgcccagtgcggcaatcgcgcagatgcgtaatatgtaacccgtattataacaactatctgatgtggacataggtagattatctccagaataaacttcatctatctgtttgaatttagtgaacaaatagacaaattcatcttatgtcggtcattgccgtagcgctgccgacgatcttatagctattgagaactctcgtttcacaacctatgttttaatttcaaaacgatcaataatgaaacttatgttttgttatgggtatcacatttcgaatttcataatcctggcgttttttatcgttaagatgctgcgttttacgcagtgctctcctctatcttgatgaagttacttgattttattgatttcgcgacagtacctgaactcaatttgtcaggggccgtactttttgttctttcctggaacatctccatttcgtgatcttttgcatggaatttttcttctaatgaatgcaaaaataaaatgaaaaatttcattggtgtgttgtttcctcaacaggcaagggagggattatgtctcagagaagtaagtacaattcggcctatgtgtacgtcctgtgttgtattgcggcgctggctggattgatgtttggttattcaacggcggtgattaccggagtggtattgcctttacagcagtattaccaactgacgccaaccgagaccggatgggccgtttccagtatcgtgattggttgtatcatcggcgcgctggtcggtggaaaaattgccgataaactggggcgtaaacctgcgcttctgatcattgcgatcatttttatcgcttcttccttaggggcggcgatgagtgaatcgttcatgatcttctccctttcccgcattgtgtgtggttttgcggttgggatggccggaacggcatccaccatgtatatgtctgaactggcgcctgctgaaattcgcggcaaagcgctgggcatttacaatatctccgtggtatctggccaggttatcgtgtttatagtcaactatctgatagcaaaaggaatgcctgctgatgtgctggtttcccagggctggaagactatgctttttgcccaagtggtaccctccattgcgatgttagcgattacgcttttcctacccgaatcaccggcatggtgcgcccgtaacaaccgcagcgaagctcgttcgataaaggtgcttacccggatctacagtggattaacggccacagatgtggccgctatttttgacagcatgaaagaaaccgtacgttcacaggacaacgtcgccgggggagaacgcaccaacctgaaaagctcgccggtgctccgctatattctgttggttggatgctgtatcgccgttttgcaacagttcacaggcgttaacgtaatgaactattatgcgccgctggtgttgcagaacagcagtaccgaagtggttatgttccagaccatttttatcgcggtatgtaatgtggtgggcagttttatcggcatgatcctgttcgaccgctatggccgtataccgattatgaaaattggtaccatcggctcaattgtcggcctgttgatcgcgtcatacggtttgtacacccacgatacaggctacattaccatctttggcatcctgttttttatgctgctgtttgccgtcagctggagcgttggcgcatgggtactgatttctgaggttttccctgaaaagataaaaggttttgggatggggctggcggtgagtctgatgtggatagccaacttcctcatctcactgttgttcccggtcataaatgataacgcctggctgcaggagaccttcggcggcgctttctcgatgtggatttttgtcgtctttaatttggtctgctatgtctttatttctcgttatgtgccggaaacaaaaggggtgccgctaacagaaattgaacggctggccgagaacaagctgcgtgaaattcaggggaaacgtcgcgatgtaatagcctgatacctctccaatattagcggagaatatccagagatattctccgctggttacacaacctttactccctccagcgagtgcgcacaggatataccctgttgaaacctccccagtgtttaccacctctacgtaactaattgatccataataatatcggcaaatagggtaagtcttcttctgcatcattattttattgcgtattcctggtgggggccgtgccgtaaatacgctatatacaaaacagggaaataatttaagagaaggcggatagcgatcttatgagcgtgtgtggcgcagagttgaataaaaaagccagccgcagaggacggctggcaaagtaccactcaacgaagtgttatcgcgggtagtctggtgagttaatccacgcgtggttctcttcccaggtgaaacgccattttcgtagcgggccggccatcacgttcagatagtagttatcgtaacccgcgatggtggcaaccgggtggtagcccttaggtactttcactacatcccggttatagaccgccatacattcatccaggctgcgatcgtcggtgtagacgcgctgtaagcagaatccctgaggtggattgaaacggtgatagtacgtctcttccagataggtctcctggccttcaactgccgtatcgtgcttgtgcgcgggccaggagctggtatcgccttcattagtgtacacttcaacgactagcaggctgtcggcgagctggctatcaggaaggatgttatgcaccaggcgctgattgcgcccttttccccgatgctctaccccgacctcttgtggcgagatcagacgtaccggaagctctccgaatcccggcgcgctgcatacggccagctcaaggtcggtttcggctgtcactttcgcctccgtatgatgggggaggtaaaccgaataagccggaatgcgttcaaacggactcatgcgctgaccaatccgatagaaaaaactgtcggcggccttaacgctggccagcccggcaaccagcaccagacagcgttcacgctcatcggacggcagggttatcgactctccagccttcaactgccagacatcaaaaccgacatactcccagcctgcattttgaggggaaatgtgttggatatttcccgactcagaggtacaggtactcagcaagttggccataatcttctcctccctgaaagcgtattaaccgagagtcggcatactgaactccgatacgatctgctgtccgttcggccaacgcgaggtaacggttttcatccgggtatagaagcgcacgccatccggcccatggacgttcagggcgccaaacaccgagcgcttccagccgccaaaagagtgaaatgccatcggaaccggaactggaatattaataccgaccatcccggcttcaaccgactgggcgaattcgcgcgcatagtgaccgttggtggtgaaaatcacgctgccgttgccgaattcatgggagtttaccgtgctaatggcggtggcataatccgggacgcgcacaattccgagaaccgggccaaaaatttcttcacgccagatggtcatctcaggcgtgacgttatcaaacagagtgccgccgacataaaagccttcaggatatcccgccacgctatagttgcggccatccatgaccagagttgctccctcgctcacccctttgtcgatgtaacccaacactttctgttgatgagcacgtgaaacaaccgggcccatttcattttcatctttgccgcgcagctctcccgggccgatacgtagcgccgcaatcagcggtttcaggcgttcgatcagacggtccgccgtttcatcgcccaccgcgaccactaccggcagcgccatacagcgttcgcccgcggaaccaaatgctccgcccataatggcgttgacggtggcgtccagatctgcatccggcatgacgattgcgtgatttttggcggccccgaaggcctgtacgcgtttgccatgggcgctggcggtggtatagatatgttccgcgacggcggaggaaccgacaaagctgacggcctgtacgcgagggtcgctggtcaacaggctagccgcctcattgccacagtgaacaacgttaaacacgccgtccggcaggccagcctcctgcagaagctgcgccatacgtaacgatgcggacggcaccagtgcgggcggtttcaggacgaaggtattgccgcaagccagagcaaccgggaacatccacataggcaccattgccgggaagttaaacggtgtgatgcctgccacaaccccaagcggctgcattaatgaaaagctgtcaacgcctgagccgacgttaaaggagtactctcctttgctgaggtgcgggatcccgcaggcaaattcgacaacctctatgccgcgcgtcagctcgccaagcgcatctgaccagaccttgccatgctcgctgacgatcagcgccgccagttcgtcccgatgcttttccagtaatactttgaattcaaaaaggatacgtgcccggcgtagcggagtcattttactccatgccggaaaagcctcatgtgcgctttgaattgccgccagcatctcctctcgggtgctctgggtgacctgacgaattactttaccggtggccggattagtcaccggtagcgtctcgccgctgctgctcagtgtcgttttaccatgaataaaattgccgactgtttccatctcttttttatcctcttaaaccgatgttgacgacgttctgactgagcggtcacaggaaagcctggttatcttcagcctaaaacgcataccgtattcaatgtaaattttaggattaaaaatttcaaatttatttttatgaaattttattttgaaagtttgacggctgatttttatacgatggtatgtgcagcaagaaatcaaaaatataattaacttattgatttttatcgtttttatttggtgtgtcatcaatggttgtctgttgtgacgaggaaagatttggaaaaaattatgatctatatagcatttttgtttcatttggtgtggtataaaaattcaaatttcaggggggtttcggcaccacagtttcggatattggagggtaaatcatgcgcttgtgcttctgtccttcagaacgagagaataaggctcagccccagttggcgtatgtgagtcaggtcagtgagagcaatggtccgtttgtccggttcatgcatatgcacccacagaccgttgaactgattcttatcaccgaaggagacggggagtatttcattggcgatcgcatctacccagttcgtaaaggcgacctggtcatttataacagccaggtggtgcatgatgagtatctggaaagcgggcggccaattggcactatttgttgtgggattaacaatatttcgtgtccgggtctacgtgagaatgcgctaataccggatgatattgtgccggttattccactgtatcaccattatgcgacggtggaaaaactgatgagctccgtgtttaccgttattaatcagcatgcggtagaagggccagcaatggcgcagctattgacccaggtagtactcaaatacattgagggaaatgtcttattgcgcacaggtaacgatgccatacagcgccatgaaaatttacttgattcaataaaatcctatattgatcgcaatttctatgagccaattcggctggatacgctggcgacgaaatttaatgtcagtccttattatgtttcccatgaatttaaacgccgctatggttattcaccgatggattacctgataaaacgtaggctgggggaggcgcaatcgttactaaccacggatgaaggcgggcgcgaaaagatcacctctattgcttatcgtgttggctttagcaaccttagtcattttcagaattacttcaaaaataaagtagggaaaacgcccggtcaatatcgcaaggactatcgtaaagctaattatttattatttgaatattaatgcttgctaaaatttaatcgtcatgagaatggtcgcaatactgcggccattttttatttgtcggtatattttatgcgtttatctatagcgcgaaaagtctggcaatatcattaaagagtgatgatttttttgtgatacctgacgcatttatcccacttcttcaaccaggatagataaagtttttcaggctacaaaaagtaatatgttgtccatcaaaggttaatttgcatcgcggtatgcagtaaaagcgtttcattaagtgggagccagcaatatgtacaatgtaaaaaagagcattaagttggggattgcgcctatcggttggcgcaatgatgatattcctgagattggtaaagaaaatacatataaacaaatacttagtgatgccgcgctcaccggtttttccgggacggaagttggcggttgttatccgcaggatcctgctgagttaaataaagagttaatgcttcgcggactggaaataccaggccagtggttttcttcctttattattcgcgatggtattgcatctgcgatgaatgcttttgaacagcattgtgcttatttgcaggcaatacatgcatatgtcgccgttgtttctgaacaaacttatagtattcaaggcattatcgataagtgcgtttatacagagaagcctaacttcagcgacagcgaatggcagcttttatgcgaaggacttaatgcgcttgggaagattgccaatgcgcacgggctgaagctcgctttccatcatcatatgggcaccggtgtgcagactctgccagaagtggatcgactcatggagaataccgatccgcaatttgtacatctgctgtttgataccgggcatatatatgtttctgacggcgatgtcatgccgctactgagtaaacattttgatcgtattaaacacgttcattttaaagatgtgcgtaatgaaaaactcaaagcatgtcgcctcgcgaagaaatcattcctcaattctttccttgatggtgtgtttaccgtccccggcgatggaaatattgattttaaatccgtattagcttatctggtcgggcatcaatattctggctggattgttgttgaggccgagcaggatcctaagaaatataacccattggaatatgcgcaaaaaggtaaaaagcatattgatgagttactgaaaaattatctttaattgaaaaggaaacagaaaatgactttaaaagcaggtattgtaggtatcggcatgatcggctccgatcacttaagacgtctggccaacaccgtgtcgggtgtagaggttgttgccgtatgtgatatcgtcgcgggtagggcgcaggcggcgctggataagtatgcgatcgaagccaaagattataatgactatcacgatctgattaatgataaagacgttgaagtggtcatcattaccgcatcaaatgaggcgcacgccgatgtagccgttgccgcgctaaatgctaacaaatatgttttctgtgaaaaaccgctagcggtgacggctgcggattgtcagcgtgtgattgaagcagagcagaaaaatggtaagcgcatggtgcagattggttttatgcgccgctacgacaaaggttacgttcagctgaaaaatattatcgacagcggcgaaatcggtcagccattaatggttcatggacgtcattacaatgccagcacggtgccagaatacaaaacgccacaggctatctatgaaacattgattcatgaaattgacgttatgcactggctgcttaacgaagattataaaaccgttaaggtttacttcccgcgccagtccagcctggtgaccactctgcgtgatccgcagctggttgtaatggaaaccacctccggcatcaatattgtggttgaagtatttgtgaactgccagtatggctacgacattcactgcgatgttaccggcgagaaaggaatggcggagctgccaaccgtcgccagcgccgcggtacggaaagcggcgaagtatagcaccgacatcctggttgactggaaacagcgctttattgatgcctacgacattgagttccaggatttcttcgatcgtctgaacgcaggattgccgccggcaggcccaacgtcatgggatggttatctggctgcggttaccgctgatgcctgcgtgaagtctcaggaaacagggaataccgagattgttgaattaccctcaaaacctgatttctacaaataaaccttccgcgtattaaaactcctgccggatagcgatgcttaagcgtcctatccggcatatcacaatttattatcttcttttatccggaacttccctatgaaaggcagactcatctcttccgatccgtatcgtcagcaattccttgttgagcgtgcggtctctttttcgcatcgtcagcgtgattgcagtgaattaatcagcgtcttaccgcgccacgcgttacagcagattgacggattcggcggcagctttaccgaaggtgcgggcgtggtattcaacagcatgagcgaaaagacgaaggcgcaatttctttccctttatttttctgctcaggaacataattacactctggcgcggatgccaattcagagctgtgatttttccctgggcaattacgcgtatgtcgattccagcgctgacctgcagcagggacggctctccttttcccgcgatgaagcgcatttaataccgctgatttccggggcgttgcggttaaatccacacatgaagctgatggcttcgccgtggagtccgccggcgtttatgaaaactaataacgatatgaacggtggcggcaagctgcggcgcgaatgctacgccgactgggccgatatcattatcaactacctgctggaataccgccgccacggcattaatgtgcaggcgctctccgtgcagaatgagccggtggcggtaaaaacctgggactcctgtctgtatagcgtggaagaggagacagcctttgccgtgcagtatctgcgtccgcgcctcgcccggcagggtatggatgagatggagatctatatctgggatcacgataaagatggcctggtggactgggctgaactcgcctttgctgacgaagctaattataagggaattaacgggctggcattccactggtataccggcgaccatttttcgcaaatacagtatctggcccagtgcctgccggataaaaaactcctgttttccgaaggctgtgtgccaatggagagcgatgccggtagccagattcgccactggcatacctatctccatgacatgattggtaatttcaaatcgggttgtagcgggtttatcgactggaatctgctgctgaacagtgagggcgggccgaatcatcagggtaatctgtgtgaagcgcccattcaatacgatgcgcaaaacgacgtgctgcggcgtaaccactcctggtatggtattggccacttctgccgctatgtgcgtccgggggcgagggtcatgctttcttcaagttacgataatcttctggaagaggtgggatttgtgaatcccgacggcgagcgtgtgctggtggtgtataaccgcgatgtccaggaaaggcgttgccgggtgctggatggcgataaagagatcgcgttaacgctgccgccgtcaggcgccagtacgttgctatggcggcaggagtcgatctgaatgatgaagctgggatttaatgaagcgacctgtatgcgaaactccacgctggcacaggatgttgtgttggcggaacgttttggctatgactacatcgaaatccgtctggatatgttgcaggagtggttgcagaaacatacgttaagcgagctggcagacattttcgccgtcggccaccttaagccctggggctacaattcgctggaagacattacgttttgtgatagcgaaagctgggcggagaaactgcggcagttggctttcgcctgccatgctggctcagtggtggggggtgattgtctggttgtggtgcccaccattcgtcaggggggaaattttccgccaggggaaacggtgaaagattcagtgaagcgtctgcgcgagatggcggcagtggcggaagaaagccggatgcggctggcctttgagccgatcggttccgcaggatgctgtgtgcgcagtcttgccatggcgatggagatcgtagatgcggtcgatcgcagtaatgtcgggctggtcgtcgatgcctttaatctttacctgcacgatcaatggcgggatctgaccacgcttcgccagatccctgtggaaaagatcttcgtttaccatattgatgacgccgataatctgccgctggcaacgctggagcattgccatcgtctgtttcctggcaacggcgtgatcccactgcatgagatcacgcatgagctagtgcagaagggctatgaggggatctgttcgctggaactgtttaaccctggctactggcagatggcggccagcgaagtctttgcgataggggcggaaaagactcgccccttcttaacagcttaatgttgccgcagcaagagatggacaaccgccgcgcccagcagcgcgcaggccgcggccagaagaaagacctgctgatagccgataaacggcgtcagcaggcccgctattggtccggtaaatccgtaggccagatcctgaaacgctgaccagacgccgagggccgtaccacgaatctccggtggcactctgcgcacaacctctacgcccagcgatgggaacatcagcgaacagccgcagccggtaatcgccgcgccaatcagcgcagcgcctgctgacggagcggcccacattaccgccagtccggtcccctctaccagtagtgaaaaggttgcgaccgtggcgccgccgtaacggtcgggaaatttggcgcagaaaaagcggacagcgataaacgcaatgccaaacagcgtcatcgcaaaaccggtgttatcccagtgacgctcgttgaaccagagggcggtaaacgcgcttagggtggcaaaaccaatgccctggagcacaagccctgttccgggccgccacaccaggccgactacccgtagcactggcacgcggggacgggctgttgggatattccccggaatgccatagatgactccgctggcgatgatcggcaacagcacgacgaggagcgccggaagcgccaggccggccctggcgtaaagcgacagccccagcggcgcgccgatagccagcgcaccgtaggtcgccatgccgttccaggaaataacctgacccgcgtgggtcgagcccgccagccacatcccccaggttaaattaccggtcaaaatgaaactttcaccgatgcccagcagcacacgaccaacaatcagtatggcccatgcgagcagcggaaccgggtgagcgattagactgaccagcatcagcagacctgatgcggcgcagtagaactgaccggtgataaccgtccgacgtccgcctgacgtgtcggcttttcgacccgcggcgccccgggtaagcaaggtggcgataaactggctgcctaccgcgataccgatcaacagatcgctcagatgcaactgctgctgaacgtacagcggcagcatgactaacgggatgccaatagtcagatagttgagaaacatcgcggcgctgatgcgaaacagcgtgatcgatgtggaatgttgtgtgagagctggcatggaatcgtccttgaacacgccccttgtccgatgcagacacggggcgtgatgaggcaggcattaacgtgccgggcggtattcgcgccagtagtcgataagcatgcggtatttttgtttcaccgttgcgatgagctgttcatcgttaagctggccgcctaaccactggcgtgacggttcgccaaagatggtccggccgacggcgaaacctttcacccagggcatatccgctgctgcggcgaatcctgacttcaactcgctttccggtgcgtccaggccaagtatcaatataccgcgacattcagggtcataatgctcaatatgctggctgatttctcgccaacgatctgggcttaacggcggcagtttccaccagtccggcaggatccccagttgataaaaacgttccacaatctgaggatagtattgctcattttggtctgccgcatcgcgcggcaagatgacttccagcagcagatcgtgaccagactggcagcaggcgcggtaaacctcgtcaatgagcgcctcttgttcaagacgtaccgactctgcatcgagtggatgatagaagaccagacatttcacgacgtgctcttgcggccagctgacaagctgagagccaatatcgccatgttccagcttcagcggatacgaaccgggcatctcaaccggtcggccaatccaccatccctggccggtcacgtcgttaagcgcctgctgaccaaaggtggtatcggcaaggatgccgctattattctgtaaaccggcctcaagcgccgcctgacgtgccccttctagcagtagcatcttcaggggggggatcgcggattcactggcgccgacttcatttgcgatatccaccagttgcttgcgatggtcaaaggcgaatacgcacagctccggccagtgctgtttacgggttgtgacccgatgaaggtgattcagccgcgggtctttgtctggccgggtgatggattgttcacgcgcgaggtagtcgtccagctcttttttggttggcatggcgggggcacaaccgtggcgcgataccactaacgcgccgcaggcgtttgcataacggcaggcttgctcccagctttcatcgttcaggtatccccgcagcagtcctgacataaaggcatcgcccgcgcccagaacgttcagaacgtctacgcgaacgccgctatgtatcttcacctgcgaccagtcatcggcgatgttgccttcaaagactgagcagcccagcgcgccgcgtttgcacaccagtacggcctgggtcaactgacggacgcgccgcagggcggtcagcgtgtcggtactgccgccggcgatatggaattcttcttcggtcccaacgatcagatcgaaatggcgcaatacctgctggagctgttcggtaacctgtgatgaggcgatgaaacgcgtttcaccgtctcctagcgacgtcaggccccacagtacggggcggtagtcgatatccagtgcccgccgcagcccgtgtttttgcgcatactccagcgctttaagaacggcggcgcgcgtattggggtgagaaagatgggtaccggtgacggctaatgcgcgtgaagaagcgatgtaatcttcgcggatatcctcaggtgttagcgccatgtccgcgcagttatcgcggtagaagatcagaggaaaggtgtcctgatctttaatgccgaggatcaccagcgcggtcagacgatcgcgatccgacagcaggcactgcgtatccacaccaacgcggtttaattcttcacgaacgaaacgtcccatatgctcatcgccgacgcgggccagcatagcggaacgtaatccctgaatggccgtgccgtaggcaacattgcctgacgatccccctaaatatttagcgaaagtcgtcatatcctccagccgtgacccgatttgttgaccatacaaatcaacggcgactcgtcccagacagataacgtccagcggcttttgctcactactgactgctttattcattgacatatcccctaacagaagacggtgttatttttgctcatactaaggtttggtgatttcattttcaataaaaatggaaataatgttttcatttattgtttgaacaagatcacagaaatggcatttccgggcaacgggcatgatcgttttttgttgtgttttttgttttaattgattgattataaatgtgttatttattttaaaatcgcatggaagataaatttcattttcatgaaaaatacgcctgaatgtcgaaattttttaaccgttttttgatctccttcccataaatgaaatataaattccatatgattgtgagaacggaaattttgatcctatgataagtctctgtgtttttggggctgaagcgatgcataagcaggcaacgacagccgaacggttgataaaagcaggtggggtacatgaaaacaatcaggttgaccatggcgcaggctttggtgcgctttcttgataatcagtacatcgacgtagacggcagcgaaatcaaatttgtaaaagggattttcgccatttttggccacgggaacgtcgtcggattggggcaagcgctggaagaggactgtggccaacttagcgttcatcaagggcgtaacgaacagggaatggcgcatatcgcgacgggatttgcccgccagatgcgtcgccatcagatttatgcctgcacctcctcagtggggccaggggccgccaatatgatcaccgcagcggcgaccgcgacggctaaccgtattccactgcttttgctgccgggcgatgtgtacgcatcgcgtcaacccgacccggttttgcaacaggttgaacaagaacacgatttgacgctgagcaccaatgacgctttccgtgcagttagccgctactgggatcgcattacgcgtccggaacagctaatgagcgcctgtatcagcgcgatgcgggtgttaaccgatccggcggatacgggggccgtgacgctttgcctgccacaggatgtgcagggtgaagcctgggattatccggattattttttcgctcgccgggtctatcgtcttgagcgtcacgcgccgacggagccgatgctgaacgaggcggttgcgctgattcgccgccaccagcggccgctgatcgtttgcggcgggggcgtgaagtactcgcaggctgaagaggcgctgctgagatttgccgaacgctgtcatctgccgattgctgaaacccaggctggcaagggagcgctcagttctgcacacccgctgaacgtcggcgggattggcgaaaccggttcactggcggcgaatctgctggcgcaggaggccgatctgattatcggtgtagggacgcgctataccgatttcaccacctcctcaaagtggatcttccagaatcccgacgtgcgctacttaaatatcaacgttagccgctttgatgtcttcaagctggatggcgtacagatgcagggtgacgctcgcgtcgccctgacgcagcttagcgaacggctggcccaggagcattatgcttcgcaatggggtgagactattcaccgcgtccgctcgcaatatatggcggaagttgagcgcgtctatgctgtggaatatagcggagagggcttcaaacctgaaattgaggatcatatggatactcaaaaggtgtttgaagagtttaatgagattacgcggtcgtggctgacccagacgcgcgtgttgggtgtgcttaaccggatgttgccggaaaacgcgctggtggtggcggcggcgggcagcctgccgggcgacctccagcgtgtctggcaaagccgcggcgagaatgattaccacgtcgagtacggctactcctgtatgggctacgaagtcaatgccgcattgggggccaaactggcgcagccggagcgcgaggtgtacagcttcgtgggcgacggttcgttcatgatgctgcactctgagttggtcacttccgtccagatggggaaaaagattaccgtcattttgctcgataacatgaccaacggctgtatcaataatctgcaaatggaacacggtatggacagttacttcaccgagtttcgtttccatcagcaggagagcggtcgtcaggaaggcgggtttatcccggtcgatttcgctcgcatcgctgaaggatatggttgtaaaagctatcgcgtcaccaccattgaacaactgcatgaagcgttggaagatgctcgtaaacagaccgtgagcacgctgatagacataaaagtgcttcccaaaacgatggtgcataagtacctgagctggtggcgcgttggtggggcgcaggtatcccgtagcgaacgtatccaggcggtagcgcgtatgcttgaagaacatatcggacaggcccggcagtactgattaatttgccgtcgttcaggttgcagaagtgtggttattgttctgcaacctgaacgatacagcgtcaacgcattgtttgcttttcagaacggcaaaataaaacgatccgtttttcgcagaactacggatgcttttcttttgcggttttaaatttactattcatgagattaagaggtacgaatgaaaaagcttcgatgtggtgttattggcctcggtcgggtaggtaaaatgcatgttgagaatatgtatttactgcctcaattagatattatctgcgccgccgattattttattgaggagatgagcgattggctttattcggtaaatataacttcagggtataaaaattatcaggaacttttacagcgtgatgatatagaggcagtttttattttcacctcaacggatatgcacgaagagatcgtcacggcggcagcgcaggcggggaagcacattttttgtgaaaaaccgctcagcatgaatgaggatgagcaggcctcaatggcggtgctgagaaaagtgaaagagaagggggtgacgctgcaggttgcctttaatcgccgttttgatcctcagtttcacgaggtctttgagctggtgcgcagcggcaagattggtcggccccagatgataaaaatcacctcccgcgatccggacctgctaccccatgatctgatcaaacgtattggcggtctgatttttgacttcaccatgcatgactttgatatggctcgttttatgatgcaggatgaagtcagcgaagtctatgttaagggcaatacgctgattgatcccagcctgaaaaatattgatgatgttgatacgcttgcggtgatgctgactttcagaaacggcggctacgcgctcattgataacagccgtcgggcggtatatggctatgaccaacgggtggaggtttttggctcagaagggatggcgtatgcggataacgttagtgagtcgacggtgaaagttttcaacagccagcactgcataatgaaaaatccccttcctgatttcacggtccgttatcgcgaagcttaccgaacggaaatattacactttattgattcagtcctgcatcatacgccggttgtctgtaccggcgaagacgcattattggcccagcgtatcgctattgccgcgcagcaatcattaaaaagcgggctgccggtgaaaataacaagcgatatttatctttaactgcatctattaataatgaagaaactctcgcactgaaaagtgtgagagcttttctataccgaggataataaaatgaaagaaatgcaggcaacgctgccccagacattttatataaaaccaggtaagtttatctggagctacctgggaacatttttatttatgttgggcggctgtattgagaacagctggttatctgcctggttaaatacgcaggggtttgatcaggcgcatatcgggcagatttttgccgggtatgggattgtggtcgcgattacctcctggctatccggcgtctgtgtggacgtttttggtcctaaaaaggtgatggttaccggttttatcgtctatcttctggcttccgtcgcgtttctgaactttgcgctacccagccatgattttggcgcaattcttgttacctatatgctgcgtggcgtggggtatccgctggtctgttactccttcctggtacgcctgaccatccagttggataatcaccagcaagggatcggcacctcgctattttgggtggtctataaccttggttttaccatcattgggccggtggtggcggcgtcgttaattcctgagttggggcatatcaacgtgatgtgggccgggatgggcgttgcgctgctgggggttctcttcatgctggtgctggaacgcaatgaattcattctgaaaccgcgaacgacgccggtcttcaaagagttatctgcgggtatctccattatgtatgaacggccacggatcggtctggcggtgattgtcaaaactattaacggtcttggcacctatggttttgttgtcgtattacctctgtttctgctggataagcactttacgcttgaggaatgggcgagtatttgggggattacctttatctctaaccaggtcttcaacattatctttggctggatgggcgataaaattggttttcgccgaaccatccagatttttggcagcatcctgaccggtgtcgctacgctgattgtttactgggtgccgatgatatgggggcataactatgtcgcctttatgctggcgatgtgtttgtggggagccgggctggctggctttgtgccaatgacgccgctggtgccgatgatggcgccggataagaagggggcggcgaactcggccgtgaactttggctccggcctggggaatttcgttgggccagcgctggtctccgttctggcagggttcggcaccggcgtggtgatgtatactatggcggggctctatttattcagcggcatcctggtgcagtttcttaaagtgcctggcgagaaatagcttcaaatattcttcaaaaatcccttatagcctgtgatgttcatcactaaattaaaccggtttttatcaagattgataaagccggttttttcaccctacgttaaattgtactaacggattacggttatttacccactcatatacgttcagggagaaaataatgaatatcgaaaaaacacggttttgtattaaccggaaaattgcaccgggtctaagtatagaagcattctttcgactggttaaacgtcttgagtttaataaagtggaattgcgtaatgatatgccaagcggcagcgttactgatgacttgaattataatcaggtgcgtaacctggcagaaaagtatggacttgaaattgtcacaattaatgcggtctatccctttaaccaactgaccgaggaggtagtaaaaaaaacggaaggattattacgagacgcacagggagtcggcgcgcgggcattagttctttgtccgctgaatgatggaacgattgtgccgccggaggttacggttgaggcaataaaacgactgagcgatctctttgcccggtatgatattcaggggctggttgaacctttgggattccgcgtaagttcgctgcgttctgccgtctgggctcagcaactgatccgggaagcaggttccccctttaaggttttgctggataccttccatcatcatctgtacgaagaggccgaaaaggagtttgcgtcgcgcattgatatttctgctatcgggctggtgcatttgtccggtgtggaagacacccgaccaacggaagcattggctgatgagcagcgtattatgctgagtgaaaaggatgtaatgcagaattaccagcaggtgcagcgtctggaaaatatgggatatcgcggtatttacgcttttgaacctttttcttcccagttggcttcctggagtgaggcggaaatagaggaacaaattaatcgcagcgtgtcattgctgctgcaatgatacagctaatttccaggtgaccgttttcagtttccgcagcgtggtatttacaatgaaaattgcttttgatgtcgatgttattaaacatttacccattacccaaatggtacggcaggtttccgagtgggggtataaatatattgagcagtcgccgcacccgcgtattaatccgttttataaacaccctaaagctggtcgcgataccatgcaggaatataaacgcgccttgcagaactacggtgtggaaatctcgtcatttattgtggtttatcgttggtccggccccgatgaagagcgtcggcgcgccgcggtaaccaactggaagcggatgattgagattgccgttgatatgggcgtacaggtgattaataccgagctttccgggacgccggatgagccggagatttgtgaagagatgtggtatcgctccatggaggaattgctgccgatcgtggaacgagagggaattcgaatcgaaattcagtctcacccctgggatttctgcgaactgaacgatgagacggtcgacatggtgcagtctttgcgtagtgataacgtgacctatctgtacagcgcaccgcatggcttcttttacgataaagggcagggcgacgtcgcaaggatgctgaactatgccggggccgatctttcgcatgttctgctggccgatacgcacaaccacacgcttccctgccgctatatcatgaacccgcctggcgtgaatgcgacgattcatcagcacatcgggctgggagaaggtgaggtcgattttgacgcgctattccaggcactgcgtgaaatggattttgcaaaccgcacgtttaaggtgggcggtgaggcaattatcaccacgtcgctgtttggttatcctgagaaaatgagtgttcaggcggtggaaacgcgcgagcggatcgagcgggagctactcggacgttaaaaacgggtggatttgcctgtaccgcgccacaggctggcgcggtcatttgcggcaattacccttcgttttccgccagctcgcgcagatactggaagatctgacgcgctgatttcggcggtttgttgccttctttctctttcttcgcattgcggatcaatgaacgaagctgttgacgatcggcgtgcggccacagggtcagtacttcggctaccgcgtcatcgccttcgacgatcagacgatcgcgcagatgctcaagtttgtgaaacagcaccacctgctgattatggcggttcttcagcttgtccagcgcctggcgaataggttcaacgtcgcgttggcgcagcatttttccgataagctgcaactggcggcggcgtccttccattttgatacgctgggccagttcaatggcgtcgcgcagatcggcgtccagcgggatcttatccagcgcgtttttccccagatccaccagttccgcgcccaggcgttttaattcctcggcatcgcgtttaatttcacttttactgacccagataatttcatcgtcttcgtcttcgatgtcatcaccgggaacgtcgtcgagccagtcttcgggctgctttgtcatgtcaggctccttaaaaaaagaggctaatgttaccagttaagatgcgcactgaaaaacggttctctgttagacttcagagaaactctctctacattatggcatttgcaatgaaagtaatctcacaagttgaagcgcagcgtaagattctggaagaagcagtttcgacagcgctggagttagcctcaggcaaatcggatggggcggaagtcgccgtcagcaagaccaccggcattagcgtcagcacccgttatggtgaagtagagaatgtcgaatttaatagcgacggcgcgctgggtattacggtgtatcaccagaaccgcaaaggcagcgcctcttcgacagatttaagcccgcaggcgattgcccgtaccgtgcaggccgcgctggatatcgcgcgttacacgtcgccggacccgtgcgcaggcgtggcggacaaagaactgctggcgtttgacgcgccggatctggacttgttccacccggcagaggttacgccagacgaagccattgaactggccgctcgtgcggaacaggcttctctaaaggcggataaacgcatcaccaataccgaaggcggtagttttaacagccattacggcattaaagtgttcggcaacagccacggtatgttgcagggatattgctccacgcgccattcgctctcaagctgcgtcatcgccgaagagaacggcgatatggagcgtgattacgcttacaccatcggccgggcaatggcggatctgcaagcgccggaatgggtcggggccgagtgcgcgcgccgtaccttatcccgcctgtcgccgcgcaagctctccactatgaaagcgccggtcattttcgccaatgaagtggcgacagggctatttggtcatctggtcggggcgattgccggcggcgcggtataccgtaaatccacttttctgctcgactcgctgggcaaacaaattctgcctgaatggttaaccatcgaagaacacccgcatctgctaaaagggctggcgtcttcaccgttcgacagcgaaggcgtgcgtacggagcgccgggacattgtgaaggatggcgtactgacgcaatggttgctgaccaactattccgcccgcaaactggggctgaaaagtaccggtcatgccggcggcattcataactggcgtatcgccgggcaggggctgaactttgagcagttgctaaaagagatgggcaccggcctggtggtgacggaactgatgggccagggcgtcagcggtattaccggcgactactcccgcggcgctgcgggattctgggttgaaaatggtgaaatccagtacccggtaagtgaaattaccattgccggtaatttaaaagagatgtggcgtaatattgtcaccgtaggtgatgatattgaaacgcgtagtaatatacagtgtggttcggtattgttaccggagatgaaaatcgccggacaataatacccgtcatacttcaggctgcaggcgcgttggctgcctgcaacccgaattattcagggtattacacttatcgttaataataaaaaaggaagtgagcaatgcgtaaaagcctgttagctattcttgctgtgtcatcgctggtattcggttcggctgtttttgctgccgatcttgaagataatatggatattctcaatgataacctgaaagttgttgagaaaacggatagtgcccctgaactgaaagcggcattaaccaaaatgcgcgcggccgcgctggatgctcaaaaagctacgccgccaaagctggaagataaagcgccggatagcccggaaatgaaggattttcgtcacggttttgacattctggtcggccaaattgatggcgcgctgaagctggcgaacgaaggtaacgttaaagaagcgaaagcggcggcggaagcgctaaaaaccacccgcaatacatatcataagaagtatcgttaatttttgtgggatggcggcttcgctttatccgcaggtcgccatccggcaaactgtaatacccatcacactttctcactttatacgacaacgtcattgttttgccatttcctctttatgccgcgatagatctcacactttcccggcgataattcattaatgccgccttttctgtggcgcagatcacctatcccactcgcgtttccacttcgaggtggaaaataactcgctacaaacttttaacccttaccgctagttttatctcattgccattaacggggtgagacgcgtggataacggagcagtaaaacacgatgccggtgagcgaattaacgaactggctgaacaggtgttaacgcaggtggatggcctgctggggcggcatcacattgtccccaatgcggtacagacgcaaatgctgacctcgcacgttcgcgcgatggcgcaccggtcaattaccggcgagcctttaccggaagtcgatgccagcttgtttgatgaaatctcagccgaatcaatggcgctcgcccgcgaaatcgtggcggcgtttggcaaccttcctgacgaagaagcctggctattatcggtacattttgaagtcgcgaaagacaacctctaaggagcaaaaaatggaacagattaccgtcgtgattggcgatcgcctgggtaaaggccagaaagtggcggcaggcgtggaaaaagcgggcggtcgcgcggtcgtcgtgccgggcgtcgcggcagacatgaagctgggcgatgtgatgaaagcggaaaacgccaccttcggcatttcattttgcggcagcggcggcgcgggcgctatcaccgcgcaaaacaagcatggctacaaagccaaatatgggatgcggtcagtagatgaaggcgtcaccgctatcaatgagggctgcaacgtgttgggtttcggctttatggataaagaagagctcggcgagcgcctggtgcaggcgtggcaaaagaaatacggcgcctgatgatgaaagagcaattcaccaccacggtgagagtaaaaggcaagggcgacgccaaagcacgcgcctttgccgatgcgctgaaccatgttcagtcggcggtgatgagagagtcgccgtatatcttactgcgtattgagccacaggatgtgcggattgttcaggcgcatgagtcggtgcgtaaagaggcctttctgtttttctttttgcgccgggaacgacgcacttacagcgtggagctggatgtgaccgtcaacgtgaccgccatcaatctcgacagggtggatttcgtcgcgaaacgctgatttttattaaaaaggcatagttatgttcctgataatactaattaaatcgctcattatcggcgcgctggtcggcgtaggggtgggcgctggggctgcacgcatgtttcacgcgccaaccacgcaggggatgggcgcgttccgtacgttgggcgaactcaactcttgtgaaggcgacccggcatctcacttctcctttgggctgggtttcttctttaacgcctgggcctcgtctgtggcggccggatcgttcacccaggatgtcgatcaccgcatcatccctaactggggcgcggcggcgctaatgatcaaaaaccgtaacgtcggcgagacgctgcacgacccgaaaaaaatggcgatcgcctgcgccgtcatcggcatgatagtcgtgacgttccttaacctgaccgcctcatccgtgccagaagcgctacaggtgacggcggttaaggtgctggtaccggcggcaaacctgctggtcaacatcgtcatgcctgtgatcttctggttagcagcgatcgacgccggtaaaaaatcgggcttctgggccaccgttttcggcggcgcggcgcagctcatcatggggaacgccgtaccggggctggtactgggtattttgatcggtaaaggcgtagaagagagcggctggaaccatgttaccaaagtgatgatggtcgccatcgttttgctgtttgtgttgagcggcttcttccgcggcttcgacatgaaaatgatcgagtctttcaacatgacggtaccgaactggcttgaactgatccacaactcgctcagcggcaaataacggaggccacaatggaagagaataaaggtttttggtatgccgactggtcgttcccgatctttgttggcctgctctcctccggcgttttcgccgggacgcatatgtactatctgtacggcatcggcgcatttaacgaagtcgcttttgtggcgatgttgaaagcggggatggataccggcgtctacggcgcggtcgccgctttcggcgccagctttttatttgcccgcattatcgaaggttcgctggtcggaattctggatatcggcggggcaattcagaccggcgtgggcttaggggttccggcgttactgctgggggctggctttgtcttcccggtggcgaactttatcgcttcgctgataaccggtctggtgattggtctggcgattggctacatcattattctggcgcgtaagttcaccattaatcagagcgactccacgtacggggcggacgtcatgatgggggccggtaacacttcaggccgttttctggggccgttgattatcctcagcgccatgacggcatcgattcctattggtctgggctctctggtgggcgcgctgctgttttatatctggcagaagccgattactggcggcgcgattttaggcgcgatgatcctcggttccatcttcccggttgcgattagctaactgttgatttgtaggccggataaggcggttgcgccgccatccggcaaaggagagaacgatgtttgatttactcctgcgccatgcgcgtctggtcgatgacacgttgactaatattgccctgcaagatggcaaaatcgcggcgttgggtgacgttgatggtccggcgttgaaaaccattgacctgcgcggtgagtgttttgtcagcgcgggttggattgattctcacgttcactgctacccgacatcgccgatttaccacgacgaaccggacagcgtgggtattgccactggcgttaccacagtggtggatgcaggcagcactggcgcagatgatattgacgatttttacaccctgacccgtgacgcgaccaccgacgtttatgcgctgctgaatgtttcacgcgtcggacttattgcccaaaacgagctggctaacatggccaatattgacgctgatgcggttcggcaggcggtaaaacgccatccggattttatcgtcggcctcaaggcgcggatgagcagcagcgtggtaggcgttaacggcatcacgccgctggaacgcgctaaagccatgcagcaagaaaacggcaacctgccgctgatggtacatattggcaataacccgccggatctggacgaaatcgcggagcgtctgacggcgggcgatatcattacccactgttacaacggtaagccgaaccgtattcttcggcctgacggcgagctgcgcgcctcggtgacacgagcgctggcgcgcggcgtgcgtctggatgtcgggcatggtaccgccagcctgagctttgcggtggctaaacgcgctattagcctggggattttaccgcataccatcagttccgatatctactgccgtaaccgcatcaacggcccggtacattcgctggctaatgtgatgtcgaaattcctcgccatcggcatgtcgctgccgcaggtcattgcgtgcgtgacggccaatgccgccgatagcctgaatctgaaaaccaaaggtcgtcttcagcctggtctggatgccgacctgaccctctttacgcttaaacgccagcccaccgtgttggtagacgcggaaaacgacagcttacaggctgaagaattgctgacgccgcttgccgcgatacgcgcaggcaagggctatatgaccgaacaagggagcgcggaacatgccttcgatttttgagaagtatcaattaaaacaggtgattaacgcctccggacgtatgacggcgctcggcgtctctacgccgcgcccggaagtgatagacgcggcgatggccggaatgaatcagtatttcgagatgaaagatctggtgaataaaaccggtgagtacattgcgaaattgctggaggtggaaggggcgacggtagtctcctgcgccagtgcgggccttgcccagtcggttgccgcggtactggttcaggacagcgactggctgctggaaaatctgcacgttacaccgattgaaaataacgaaatcgtcctgccaaagggccacaacgtcaactttggcgcgccggtgggaacgatggtggcgctgggcggcggcaaactggtggaagccggttacgccaacgaatgttccgccgcgcagttggcggcggccattacgccgcgcacggcggctattctctatatcaaatctcaccactgcgtacagaaaagtatgctcagcgtggagcaggctgcggtggtggcgcgcacgcataatctcccgctgattgtggacgcggcggcggaggaagatttgcagtgctactaccgcgtgggcgcagatctcgttgtctatagcggcgcgaaagcgattgaagggccgaccagcgggctggtgattggcaaaacgcagtatgttgagtgggtaaaacgtcagtcagcgggcattggccgggcgatgaaggtcggcaaagaaggaattgttggcctgacctgcgccattgaattgtacctgcgggcgcaaaaagagagcggcgcggagatggtagaaaaaatggcgccctttatcgacacgttgaacacgtttaacggcgtcagcgcccgcgtagtgtgggacagcgccggacgcgatatcgcgcgcacggaaattaagtttgatgaagccgttaccggcatcgccacaggcgaactggtcgacgcgctgaagcaaggggaatacgcgatttactttcgcggatacaaagccaacgaagggattattgaagcggatgtccgcagtgtcgatcgcgcgcagttagcgattgtggcgcgtcgtattggcgaggtgattaatcaggagaaacaagcatgaaactgacccctaacttttaccgcgatcgcgtttgcctgaacgtactggccggttcgaaagataacgcccgggaaatctacgcggcggcggaaggtcatgtgctggttggcgtgctctccaaaaactatccggatgtggcaagcgcagtcgcggatatgcgtgaatatgcggcgcttatcgataatgcgctctccgtcggactgggggcaggcgatcctaaccagtcggcgatggtgagcgaaatctcgcgtcaggtacagccgcagcatgtcaaccaggtgtttaccggcgtaggaaccagccgggcgctgctggggcaaaatgagacggtggtgaacggtcttgtctcgccgaccggcacgccggggctggtgaaaatttccaccggcccgctaagcagccgcgcgccggacggcatcgtacccatagaaacggcgattgcgctactcaaagacatgggcggcagctctgttaaatactttccgatgggaggactcacctgtcgcgacgagtataaagcggtagctgaggcctgcgcccgccatgatttctggctggaaccgacgggcggtatcgatctggaaaacttcgccgagattctgcacatcgcccttgatgcaggtgtaagcaaaatcattcctcacatttatagttcgattattgataaggtgagcggcaacacccgtgcggacgatgtgcgtcagttactcgctatcgtccggtcgcgtgtcggctaatcatgaggagagagacgtgcgattccccaaccaacgtttagcgcagctatttgcgatgctgcaaaacgagacgctgccgcaggacgagctggcgcagcggttgtcggtctccacgcgtaccgttcgggcggatatcgccgcgctgaacatgttgctgacgccgcatggcgcgcaatttactctcagccgcggcaacgggtatcagctcaaaattgatgatccggcacgttatcaatccctgcaaacgcagcaatctcccgccctggcgcgcggtccgcgcaccagccaggagcggatacactatttgctggcgcgttttttaacctccgccttctcgctgaagctggaggatttagcagatgaatggtttgtcagccgtgcgacgttgcagaacgacatggcggacgtgcgcgagcatttgctgcgttatcatctgacgctggaaacgcgtccgcgtcatggcatgaaattgtttggcggagagatggcgattcgcgcctgtctgaccgaccttttatggacgctggcgcagcaggagccctctcatccgttaattgttagtaccacgctgaacaccgaggtgtctcaacggctgcggtctcttttgccggatattttctctcattgtcaaatccgcctgaccgatgagggcgagctgtttctgcgtttatactgcgcggtggcggtacggcgtattcgcgaggggtatccgttatcggaatgcgtggcagaggaggtcgatgaaaaggtgcgccatgcggcgcatgagattgcggagctactacaacagctggctgacaagccgctgtcggagccggaagtaagctggctgaaggtgcatattgccgcccgccaggtacaggagattgcccccagcgccattaatgccgatgatgaagaggcgctggtgcactatatcctcaattttattaatacccagtacaactataacctgttgaatgataaacagcttcacgcggacttgctgacccacatcaaaacgatgatcacccgcgtgcgctaccagatcatgatccccaacccactactggaaaatattaagcagcactatccgatggcgtgggatatgacgttggcggcgatatcgagttggggaaaatacacgccgtataccattagcgaaaacgaaatcggttttctggtgctgcatattggcgttgggctggaacgtagttacaacattggctaccagcggcagccgcaggtactgctggtgtgcgatgctggtaatgcgatggtgcggatgattgaagcggtactggcgcggaaatacccgcagattgagattgccctcactctgacactacgcgactatgaggcgcgggacagtattgtggaggattttgtgatttccacggcgcggatcggcgaaaaagataagccggtcatcatgatcgccccctttcctaccgactatcaattggagcagatcggtaagctggtgctggtggacagaacccgtccgtggatgctggataaatatttcgatgcctcgcattttcgcatcgtggagggggaaatagatcaacagacgctgtttaaaacgctgtgcgatcagttgcacgaggaaggctttgttgatgcggcgtttctcgattcggttattgaacgtgaagctatcgtcagtacgttattaggcgacgggattgccttgccgcacgcgctggggctgctggcgaagaaaacggtggtttatacggtgctcgcgccgcaggggattgcctggggtgacgaaacggcgcacgttatttttttactcgccatcagcaaaagtgagtatgaagaggcgatggccatctacgatattttcgtcactttcctgcgcgaacgcgccatgacgcgcctatgcgcatgtcagaattttacgcaatttaaaacggtcgcgatggagtgcgtgagtcgtttttgagaggcgttatccagaattcgatgtaatgcgaatgtaatgctaaactgcattacacattcgattctactggaggcataatggccacgctgaacgtccgtctggatgacaaactcaaaaatgaggcttatgccgtgctggaaaaactgaacattactccaacggaagccgtgcgattactgttccagtacgtcgcggaaacggggcgcatgccagtgaaaaccgtcactcttagcgacagtgaagatgcattgattcagacagttcgggagaggctgtctagtccgcaaaagggaatcaaggttagtctggatgacttatgaactggaattcgacccgagggccttaaaagagtggcataagctgggcgatacggtgaaggctcagcttaagaaaaagttggctgatgtgctattgaaccccagaatcgactctgcccgtttaaacggtcttcctgactgctataaaattaagcttaaatcgtccggttatcgtctggtgtaccaggttcgggatgacgttgtgattgtgtttgttgttgcggtcggcaagcgagaacattcagccgtctatcacgatgcaaacaaacggctttagcgatcaacgcaaatgatgcactacctggttgctgctaccgcgccagataagcgccgggtctttcagatcctgcacaaatttgccatcgaccagcacgttgatgagatcgactacctgcatctgtgcggcgttgagttcatcgagcttgtagccggtccacacccagatatctttccccgggcactccgcgtggatgcgttgtaccagtgccaggatatccggtacgttttgcggatgcagcggatcgccgcccgacagcgagatcccctgacggtgaatgcgcgtgtcgttcagatcggcaatgatcttatcttccatctctttggtaaacggctggccggagttcagccgccaggtgcttttgttatagcagccagggcattcatgcacgcaccctgacacaaacagggtgcagcgggtgccggggccgttaacgatgtctacggggtagtattggtggtagcgcatagcgggtgtccagaaagcatgtaggccggataaggtgcttgcaccgcatccggcaacattgtgatgcctgatgacgacgcgattgcgtcttatcaggcctacggtctttgcaaacggaaattaacctatctgcccattgcctaaatgcttcacgcggcgcttcacttcttcctgcttaccggcgttaaacggacgcgcgtccgggctgcctaaataaccgcacacgcggcgggtgaccgagacgcgcgcggcgtcgtggttgccgcatttcgggcaggtgaaacctttactggtacattcgaactccccggtaaagccgcactcgtagcattcatcgatcggcgtgttggtgccgtaatacggtacatgctgatagctgtaatcccagacatcttccagcgctttcaggttgtgctgaatgttcgggtattcgccgtagcaaatgaaacccccgttcgccagcggcggatacggcgcttcgaaatcgattttgtcgtacgggttgaccttcttctccacgtcgaggtggaagctgttggtgtagtaacctttatcggttacgcccggcaccacgccgaactcggcggtatccagacggcagaagcggtcacagaggttttcacttggcgtgctgtacaggctaaagccgtagccggtctcgtctttccactgatccacggcctggcgcagacgctccacaatcgcgatgcctttagcgcgaagttgctcgctgtcgtacaggtgttcgccgccgaacagcgcgttaatggtttcatggataccaatgtagcccagagagatggacgcacgaccatttttaaagatttcagacacgtcgtcgtccgctttcagccgcacgccgcaggcgccttccatatacaggataggcgcgacgcgggctttcacgccttcaaggcgggcgatacgggtcatcagcgccttccgcgccagcgccagacgttcatccagcagtttccagaatgcggtttcgtcgccttttgcttccagcgcgatgcgcggcaggttaaggctaatcacgcccaggttgttacgcccgtcgtggatctgctcgccgttttcgttctcccacacgccgaggaagctgcggcagcccattggcgttttgaacgaaccggtgactttgaccacctgatcgtagttgaggatgtccggatacatgcgcttgctcgcgcactccagcgccagttgtttaatgtcgtagttcggatcgccaaacttgtggttcaaaccatcgcggatagcgaagaccagtttcgggaacacggcggttttgcgatttttacccagaccggcgatacggttacgcaaaatagacgcctggatcagacgcgactcccaactggtgccgaggccaaaaccaaaggtaacgaaaggcgtctggccgttagcggtgtgcagcgtgttaacttcgtattccagcgactggaaggcgtcgtagcactctttttcggtgcgagaacgcgcatacccttcggcatccgggatctgccactcatcggcggttttgcggtgcttgttgtagctttcggtgacaaacggcgccagcacttcgtcgatacggttaatggtggtgccgccataaatatggctggcgacctgcgcgataatctgcgcggtaacggcagtggcggtagagattgatttcggcggttcgatctcggcgttacccatcttaaagccctgggtcaacatgcctttcaggtcgatcaacatacagttgaacatcgggaagaacggcgaatagtcgagatcgtgatagtggatatcgccgcgctcatgcgcttgtactacgtcacgcggcaacaggtgctggcgggcatagtgtttggcgacaatcccggccagcaaatcgcgctgggtgggaatgactttactgtctttgttggcgttttcattgagcaacgcggagttagtttgctctaccaggccgcgaatttcctggttcagacgaccacgcttttcacgctgaatgtcgcgatcgtgacggtattcgatgtaggcgcgggcaagctgtttgtacgggccggacatcagttggttttcaaccgcagtttggatctcgttaatatccacctgactgcgcgcgttcatttggctgctaacgacttctgcgacggtggcacagtaatctgcgtcatcgactcccgctgctttagctgcacgtagaatggcttccttaatgcgctctgatttgaatggcactttacagccatctcgtttcatcacatgcggtgtcatgatcactccatatttgtaagaacaggttatccacagaggccggggaagccataacaggtttattcatctcttttccaacgacttcccgcaatcctgacccaggttatccacaattcaccttgtgtcgagtgaacaggtgttgtagcaattgtagtcaattaatacaacatattgggtcggtgtgcattttaaagtctatatgtagtgatttgcatcaaggatgtttgcaattttattgatgtagaacaaggtaaaaatcagagcgtacagatggcgggcgctgtagcgtttgtaaaagatagcaagaaaaatctgattaattattcaacaaaaacagtcagtaacctggagcaacgccacagcctgtgtcaataggtttgtggcgtttatccgtataaggatgtcgcgttagcgttgtaaccaccagatggcttcaaatgggcggagcgtcatcgcggctggctggctggcgacctcgccataattatgcagtagcgcctgccactgtcctttgatatgcggcggatgccactcctggcactggttactcagattggcgacaaccagcaggatttgcccctgccactggcggcgataacaccatactgatgggctatccgggaggagatcctgataatcgccccagatcagtacaggctgggttttacgtagcgcaatcagcttttgataggtgtaaaacaccgagttttcatcgcgtaatgccgcctcgacgttaacctccgtatagttatcgcacaggcttatccacggctcgccttgggtgaaaccggcgtttttaccgttgtcccattgcatcggcgtgcggctgttgtcgcgggatttactggccagaatagccagcagttcgtcggggtcgcgcccggcggcgcgtagcgcggcaaacatgttatggctttccacgtcgcgataatcggtgatgcgggtaaagtgtgggttggtcatgccgatttcttcgccctgatagatataaggcgtcccttgcataccgtgcagcgccatcgccaacattttcgcggctggaacccggtattcaccctcgtcgccaaagcgggaaacgatgcgcggctgatcgtgattacaccagaataacgcgttccaggcgacgttatgcatcccctgttgccagtggcggaacaacgctttcagcgccacataatcaggttttgccagcgtccacttttcgccattggggtaatccaccttcagatgatgaaaattgaaggtcatcgagagttcgtcgccgctaagcgcggcatattgctggcagttttccagcgtggtagaggacatttcgcctaccgtcatcagattacgcggcgtaaaaacgtcacggttcatttcgcgtaaaaacgtatgcgcgcgcggcccgtcggtataaaagcggcgtccgtcgcccgtcggatcgtcaggaaaattctgatctttggcgatcaggttcaccacgtccagacgcaggccatccacgccgcgatcggcccagaattcgcagacctttttcagctcggcgcgtacggcggggttttcccagttcaggtcggcctgttcaggcgcgaaaaggtgtaaataatattgttcgctctggctatgccagcgccaggcgctgccgccaaatttggattgccagttattcgggcagacatccggcgtgccatcgcgccagatataaaactgacggtatggactctctttgttcagcgcttcgcgaaaccaggcgtgctgggtagaagtatggttaaacaccatatccaggatgatacgaataccgcgtgctttcgcctgcgcgaccagctcgtcaaaatcatccagcgtgccgtaggtcgggtcgatagccgtataatttgcgacgtcataaccgttatccacctgcggcgagatataaaacggcgtgagccagatggcgtccacgccgagtcgctgtagatagtcaaggcgctgcgtgacgccgcgtaaatcgccggtgccgctgccggtcgtgtcctgaaaactttttgggtagatctgataaataacgccgttttgccaccagaggggaatagtcattgttgtttcctgcaagtgcgttgggacgcaactgcgccccggagaagtattagacaatttgtaatgtgccctgacgatgcttacgctgatagataaaggtggtcagaatcaccgggatcacgatcgcgataaccatcgccatgccgtacacctgccagtagcgcggcggtatagacaggatgcccggcaggccgcccacgccgataccgttggcgatgacgccgttcagaccgcagagcagtcccgccagaccagatccgatcatcgcgcacagcatcggaaaacgatacttcaggttgataccgtacatcgccggttcagttaccccaaggtaagcggaaatggcggcaggaacggagatctcgcgttcattgtgtttacggctggagatgatgatgcccaccacggcggaggcctgcgcgatattcgacagcgcaatcagcggccagactggcgtaccgcccatgctctggatcatctgcatatcgatagcgagcgttgtctggtggacaccggtaatgaccagcggggcatacaggaagccgaacagcgccgcgcctatcggggcgaaactgccggtcatcagataacgtaccgcaaaggccacgccgtcgccgatcatacgaccaaaggggccgataaaggtgtgggcgagaaagacggccagtattaacgaacacaccgggacgacgaccaggtagagataatccggcacgatgcgtttcaaccgcgtttcaataaatccaagcgccagccctgccagtagcgccgggataacctgcgcctggtagcccactttctcaatgctaaataagccgaagttccagacgtccggcgtttgctggcccagcagatacgcattcatcaactgcggcgacaccagcgtcacgccgagcacgataccaagaatcggcgtgccgcccattttttcaccgccgaccagcagattcccaccggcagatagaaaaagatcgcttcgccgatcaaccataaaaaatcataaagcgtttttagcgccggatgcatctgcgccagcgtttggccgttgctcatcggcacatcgccgatcacgttacgaaagcctaagatcaaaccgccgctgatcaacgccggtagtagcggaaagaagatctccgcaaagtgggaaattaactgctcatgccatttcatgttctggcgagcggcttttttggcctgctctttatcagcatacgctttgccggtggtctccagcagcgcgttatagtaatcgccaacgtcggtgccaatcaccacctgaaactgaccagcgttggtgaaacaacctttaaccatcggtaattgttcgatctcttttggcctggcgttcgcgggctggtggagcacaaagcgcaggcgagtaatgcagtggctcaccgtggcgatgttgtcgcgcccgccgaccaggtcaatcagccggtcgatatcggcttgttttactttgctcatcgtaaagcctcatggcagaggagatatgttatgggttggcgcaagagtagctcttcaacgttggtttaaaaatgggaacgttcccgaaacgcagcgacgatcacaaattactcgtggtattccgtttaattagtcactcaggcgagggtagaaggaatgacgatccggcgcggatcgcagcggccattgatctgttcgatcagctgcgaagccgcctgtcgtccggcttcagcatagccaggatcgacagtgacgatctccgggtgcaggaattttatcagcggcgtgttcccgacgcttgccagttgcagcgtctcaatacgttgctcctgtaaatacttactggcgcccaacgccagcgtatcggtggcgcagactaacgcggtggtatccggcatgatgacgcttgccgtatgctcatagccctgcttcatggcaagaccgggcagggcggcgacggggtgaagtttatgttttttgcaaaacgccaggtatgcgtcatgccgacgtttgccggtggtaatatcgctatggggaacgcccagaaagctaatgttgcggtgtccctgctcatacagccgctgcataaggatatgaatcgcgccctcgtcgtcgtaacagacggaggcaaaaccttgcgcatctcttgccagcagcaccagcgaggctttccagggggcgatcaactcttctgtgatgccggtaaagccaaacagcaccacgccatcaatgttacgtcgtctgagcatgcccagatgttccattaccagcgtcggcgagaactgactttccatcataatagggtcgtagccctgttcgtaaaacgcaggcagcatggtctgaaccgcgaggttttcagacaacgaatcaaggcgagtgacgataatagcgaccactttatcgctttgtccccgcatcgcgcgggcggagcgggacggggagaaaccgtgttgattcatcaccgcttcgacacgctcgcgggtacgttcgcttacgccgctttcattgttaagcacgcgggaaacggttgatttccctacgccgctcaggcgggcgatgtctttgatagtgagccggttttgcatcctgttttcccgtggcgtgacgctgatggtgataaaaagagtaactttactcaagcgaagggcaatgggcaaagtctggtttatcgttggtttaattacgtaacggtatgataccgccataattgccacaaaacttatggatttatgcgtataatccgcggcgcaaattatttacttaccggaggcgacatggaccctgaacccacccctctcccgcgatggagaattttccttttccggtaagcctgcctctgctgtcttaccggtgtgtaagacagtgacacaataacgtccctgtttttatttaaacattgctcatcgggcaaggctttgccgtgcctgaagaattttctgcgcctgacttcggcgcggagggattacctatgctaaaaatcattacccgccagctttttgcccggcttaatcgtcatttgccttatcgtctggttcaccgcgatccgctgcccggcgcgcagaccgcggtaaatgcgactatcccgccttcgctgagcgagcgctgtctgaaagtcgcggcaatggagcaggagactctctggcgcgtttttgatacgcacccggagggattaaacgctgccgaggtgacgcgcgcgcgtgaaaagcatggcgaaaaccgccttccggcacagaaaccctcgccgtggtgggtgcatctgtgggtatgttatcgcaatcctttcaacatcttactcacgattcttggcggcatttcttatgccacggaggatctgtttgccgcaggcgttatcgccctgatggtcggtatctcaacgctgctgaattttgtgcaggaagcgcgctcgacaaaagcggcggacgcgctaaaagcgatggtgagcaataccgctaccgtactgcgggttattaatgaaaatggcgaaaatgcctggctggaattacccatcgatcaactggtgcccggcgatattattaagctggcggcgggggatatgatcccggcggatttacggattatccaggcgcgcgatctgtttgtcgcccaggcgtcgctgaccggcgaatctctgccagtcgagaaagtcgccgcgacgcgtgagccccggcaaaataacccgcttgagtgcgacacgctgtgctttatggggacgaacgtcgtgagcggaacggcgcaggccgtggtgatggcgaccggcgccggcacctggtttggtcaattggcggggcgcgtgtcggaacaagataacgagcagaacgctttccagaaaggaattagccgcgtcagtatgttgctgatccgctttatgctggtcatggcgccggtagtactgattattaatggttacacgaaaggtgactggtgggaagcggcgctatttgcgctctcggtcgcggtagggctcaccccggaaatgttgccgatgatcgtcacctccaccctcgcgcgcggggcggtgaagctctcgaaacagaaagttatcgtgaagcaccttgatgcgattcagaacttcggcgcgatggatattctgtgcactgataaaaccggcactctgacgcaggataaaattgtgctggagaatcacacggatatttctggtaagcccagcgagcatgtactgcattgcgcctggctgaacagccattatcagaccggtctaaaaaatttactggatacggcggtcctggagggagtagacgaaaccgccgcgcgtcagctctccggacgctggcagaaaatcgatgagatcccgtttgattttgagcgtcgccggatgtcggtagtggtcgccgaagattcgaacgtgcatcaactggtctgcaaaggcgcgttacaggagatcctgaacgtgtgtactcaggtgcgccacaacggcgatattgtgccgctggacgacaatatgctgcgccgggtgaaacgcgttaccgacacgctgaaccgtcaggggctacgcgtggtcgccgtcgcgaccaaatacctgcctgcgcgtgagggcgattaccaacgtatcgatgagtctgacctcattctggaagggtatatcgcttttctcgatccgccgaaagagaccaccgcgccggcgctgaaagcgctgaaggcgagcggaattacggtgaaaattctcaccggcgacagcgagctggtagcggcgaaagtttgccatgaggttgggctggatgcgggcgatgtcattattggcagtgatattgaagggttaagcgacgacgcgctggcggcgctggccgcccgtacgacgttgtttgcgcgtctgacgccgatgcataaagagcgcatcgtcactttactcaaacgcgaggggcatgtggtcggttttatgggcgacgggattaacgatgctccggcgttgcgggcggcggatattggtatctcggtagatggcgcggtggacatcgcccgtgaagcggccgatattatcctgctggaaaagagcctgatggtgctggaagaaggcgtcattgaaggtcgtcgtactttttctaatatgttgaaatatatcaagatgacggccagctcaaatttcggtaacgtgtttagcgtactggtggcgagcgcctttttgccgttcctgccaatgctgccgctgcacttgctgattcaaaacctactgtacgatgtatcccaggtggcgattccgtttgataatgtcgatgaagaacaaattcaaaagccgcagcgctggaatccggcggatttggggcgctttatggtctttttcggtccgatcagctcgattttcgacattttgaccttttgtctgatgtggtgggtatttcatgcgaatacgccagaaacgcaaactttgttccagtccggctggtttgtggtgggattactgtcgcaaacgctgattgtgcatatgatccgtacccgccgtctgccgtttattcaaagtcgcgccgcttggccgctgatggcgatgacattgttggtgatggtggtgggagtctcgttgccgttttcgccgctggcgtcttacctgcagttgcaggcgctgccgttaagctatttcccgtggctgattgccattctggtgggatatatgacgttaacccagttggtgaaagggttttacagcagacgttatggctggcagtaaacactttcgtcggggattcgccagcgtgcttaatccccgatatcgctaaccaggccagatgcccgtaaagctcgacaagtttaacgcgatcggctttatctttaaatttcagggcttattcaagcaactgtagaatgctatatgcaggcataaaaaagaggaatgtccagctaagtttgtaaaatacattctctgcccccgagccagaacgagaggaggagatgtcccaccgccggatatgttttgcggatatgcgacgaaagcggcgaatatagctaatgcaataaactaagtaaggaggaatcgctaaggcggcagtgggtttaggaaacataagggtaagcaatatggctgcgacaatgaagcataaaaagactatcttcgcggtagattctatctgttttaattcctggcgtatgctttcagcatgtttctcctgccagcgacggagcgtgctgttgctaaatccatattcttcgcacaacgccttattcggtacgccgtttttcgactgttgcagaaaatcggcgatttgttcctcggtaaaacgcgatcttaccattgccgcctctccatggctgttggtgccccgaaccgggcaaacttgcgccgcccggcggggatgacgtccggcgcttagcgacgaacagcgatcgcttcaatctcaattttcacgtctttcggcagacgggcaacttccacgcaggaacgcgccgggaaggtggcgttgtgctcggtgaagaaggcttcgtaggtggcgttgacggtcgcgaaatcgttcaggtctttcacgaatacggtcgttttcacaatgtcgcctactttcaggccagcggcttccacgatagctttaacgttttccagcgactgacgtgcctgagcggatacgtcttccgctacggcaccggttttcggatcgaccgggatctgaccggaagtgattaccatgctacccaggtcaacgccctgtacgtatgggccgattgctgctggtgcattttccgtcgcaatagttttgctcatgatttctcctgaattacagcggtaatagaatgtccccgctcattatagggagccgggatctcataaccaacccaaattagttggccagcaccacataatgcgaaaactctttttcacagtatttgcatttgagggcgatatcattggcgcgttttttcactgcaaagctggaggatactggttccgcgtggctgatgcagttgctgttcgggcaaaccagcacattattaatacgctctggcaggctggggcgtgatttcccgactacgtcgtagttgtcgatgcggttaacggtggcctgcggcgcgtacagagcaagttggttaacctgctcttcggtgagaaaggtgttttctattttgattaagtctttacgccccatctcgccagacgggagattcagaccgatagtgattcgctgatcggtctcggtcaatttaaacagactcagcagtttaaagcctacctgcgcagggatatggtcaatcacggtgccgcatttaatggcttcaacctgcagtttgttatcgtgtgtcatcgtttttctcccttacagactcagttcgctattcagtactaacgccagtaacgcctggcgagcgaaaataccgttgcccgcctgttggaagtaccaggcgtgtggcgttttatccacatccgtggtgatttcatcaatccgcggcagcgggtgcagcactttcatattttcacgcgcgccgttcaggtcgctggcgcgcagaacaaactgcgccttcacattggcgtactccgacgggtcgagacgctctttctgtacgcgagtcatatagaggatgtcgacgtcggccatgacctcttcaatagaaccatgcaggctccaggccatccctttttcatccagcatatccagaatgtactgcggcatcgccagcgcgtccggcgcgataaaataaaaacggttgccgctaaatttcgccagcgcctgggttagcgaatgcacggtgcggccatatttcagatcgccgaccatcgcgatatgcaagttatccagacggccctgcgtttcctggatggtgaacagatccaacagggtctgtgtcggatgctggttcgaaccgtcgcccgcattgagcaccggcacctgaccggaaaactccgtcgccagacgtgccgcgccttcttgcggatggcgcatcacaatcgcgtccacgtaagtgctaatcactgagatcgtgtcggctaacgtttctccttttttccccagcgacgtgttggcgctgtcggagaagcccactacgctggcgcccaggcgatgcattgaagtttcaaacgacaggcgggtacgcgtggaggcttcgaaaaagcagctggcgatcactttatgtttcaaaagctccggctgcgggttggcttttaatttcgccgccgtcgccagtaccagattaagatcgtcgcggctgaggtcgtttatggaaatgatatgtttttgatatagcgggttagccatgtttatctcctgacgcctgggcaaaaaaaaacccctcaattgaggggcttggtattggttttcaacggaaagaaaaacggcaggcctgcgtcttttttcagacgcggtaagacagaatgtcgtacacactgaaccatgcttcctcccggcaaattgtccgcgattatactcagctctgttttgggatcaagcgattaatgcatgatttactcatcgcaaacggttcttatgaatttaaattcattttaagcaaataattaatttgtttgtgtaccagcgccgtgcgctgaacgacccgtggtgcgacccagacaatactgctaccggcaacgacgccgagaatttccggcaatgcgtggtaatccagaattctcgcgacggcgcgaccataacctgccgccgtatggataaggataaattcgctattatgttcaacgctaacgaccatttcggctattgaacgtccggcatccggcgaaggtcgccgctggggatttacggaataaatcttttgtcccttcgtatttctgatttttattgcgcccagcagcttgagcaggcgcgaaaccgtagactggctgataccttcaaatccctcattttgtaaatcgcggcgaatctcctcctgggacaggtaacttttttcactaatcaggcgctgacaaaccgccagttgctgttgttctttggcggagtaatcatcgtattccttcataaatgcaccttatctttattattgatatcaacggactggcgaaattcatcacatttgtcacatcgattgcggatcaatcgggcggttttgcaggaaaatgagaagccgatcaaaaaaggtgacggcgtgcctgatggcgctgtgcttatcagtcctgtcagataagacgcgtcgccatctggctcgttacatcatcgctccgatgctcagtaccgccatattcagcaatgtcaggatcagcaacagcggggcgacccatttcagatagcggacatagggaacccgcgcgatcgccagaccgcccatgaccacggcggaggtgggcgtaaccaggttcacaatcccggaggccgactggtaggcggttacgaccaaatcccgctgtacgtgggcaaaatccgctaacggcgccataatgggcattgtcaatacggcaagaccggaagaggagggcaccaggaaggagagcaatacttccagccagtaggttacgtttatgaaaatagtggtagagaggccggaaaccagactttccgcgctgtgcaaaatggtgtgggtaatcataccgttatccatgaccaccacaatgccgcgcgcgataccaataattagcgccacgccgagtaaatcccgcgcgccgtcaataaaggtactggtgaacgcttcctcacccatccgcgttatcacgccaacgataatcgccgccgccagaaagacgccggagatttccgccatccaccagccgagaaccgccacgccgtaaatcatcaccgcgaaagaggcggcgaagatcatcagcacccatttccgggtagccgtaaactccagcagagtattggctcgattgccgaggaaatgggcgcggttttcctccattttatctgccacgatagaaagctcaggatgggcgcggactttgcgcgcatagcgcattacccaaaacacgcacagtacgtagccgacaattaacagcagtactcgcatcagcattccctgagtaaaagggatgccggcggcgttggcggcaatgaccgtggcgaaagggttaatggtcgaaccgagcgtgcctatccccgcgccgagcagtacggttgccgcggccactaacggatcgaagcgggccgccatcataaccggcaccagcagcgtgtagaagggcaacgactcctccgccatgccatagatagtgccgcctgcggcgaacagcgccatcagaatggggatcatccactcatctttgccgttgagtttgatagttacccgttcaataccggcatcaatcgcccccgttttattcaccacccccagaaagccgccgataatcaagacaaacagcgcgacgtcaatggcgccggcggtgtaggtttcgtggttatagaggccgtcaatcggcgccagtaaaacagcggtaatcccttgcggatgcgcgtccacgggggcatacgttcccgccaccggcacctcttttcccagcgtggcgttcatcgccatttggtattttcccgccggcacaatccaggtcatcactgcgaccagggcaataagaataaacaggatggtataagcggtgggaaatttaaatttacccatgatgttctctcctgatatcacggatatgcgccgcgagggcgcatatcctgtgggattagtcgccgagcgtcgccaccatgactgctttgatggtgtgcatccggttttccgcttcatcgaagactatcgagcctgcggactcgaacacctcttccgtgacctccagtcctttcaggccgtaagccatttcgatttcgcgtcccactttggtgtgctcgttatggaaggcgggcaggcagtgcataaacttcacatcaggattaccggtagcgtttaccacctgctggttgacctgatatggcgtcatcagactgacgcgctccgcccaggcttctttgggttctcccatcgagacccagacgtcggtatagaggaaatccacaccgtgaacgccgtcttcaacgctctccgttaaggtgatacgagcgccggtaacgctggcgatttctcggcactgcgcgaccagcgcggcatcaggccagaaggactttggcgctatcagacggatatccatgcccatcttcgccgcgcccaccatcagcgaattgcccatgttgttgcgcgcgtcgcccaggtaggcgaagctcagttccggcagcgttttgcccggcgcatgttccagcatggtcatcagatcggccaggatctgtgtggggtgaaattcatcggtcaggccgttccagacgggaacgcccgcgtattcccccagctcttccacaatgtgttgaccaaatccgcgatattcgatgccgtcatacatccgccccaggacgcgagcagtatctttcatggactctttatggccgatctgcgagccgcttgggccgagataagtcacctgcgcgccctggtcgaacgcggcgacttcaaacgcgcatcgggtgcgagtagaggttttttcaaaaatcagcgcgatgtttttgccgatcagtgtttgcttttcgcatccggctttttttgcggctttcagctcaatagccagatcgatgaggtgttggatttccgccggggtgtagtcaagcagcttcaaaaagttacgatttttcagtgaaataaccattacaatatccttgttaaaatgaattgcctgatggcgctgcgcttatccggcccacggttatgcgcgctctgtaggccgaataaggcggaagccgccatccggtaaaaagccttatgcgtcaacgtcggcggtttcacaccgaatcaaagtacctttctcgcccgcgagaatggcttgcccatccgccagcgagccgattccggcaatgccgcggcaatggctgacaaactcagcgcaggcggtcactttcgggcccatcgaaccggcgtcgaactgcatttcacgaagcagctccggcgtaacctgcgccagcgggcgttgggtgggcttgccccagtcgagatacaccgcgtcggcatcggtcagaatgagcagcgcgtcggcgtgaatttggctggcaagcagggcggcggacagatctttgtcgatcaccgcctcgataccgtggtagccatcggctttttccacgaccggcacgccgccgccgccgttacagataaccaggtgatcgcggctaatcagcgcgcggatggcatcgttttccacaatgcgtttcggctgcggggagggcacaacgcggcggaaggcgttaccgtcggctttgaatacccagcccttttctgcctgtaacgcacgggcctgcgcttcgtcgtaaatcggtccgatatatttggttggattgaggaatgccgggtcgttggcatcgacttcgacctgggtgagcaggacgctgatttcacgctccggcagatgattcttcagcgcctgttgcagcatgtagccaatcatgccctggctttccgcaccgagaatatcgagcgggtagggtgtaacgttagcgtaggcgctattttgtagcgccagcagtcctacctgtgggccgttgccgtgcactaacaccacgcgccattgccgcgtaagctgggcgatggttctggccgccagttcgatatttttacgctgaatatcagcctccagcggttcgccgcgtttgagcagcgcattgccgcccagcgcgacgaccagtgtgcgtttgttttccataacgtctcctttaaataccatcgcgttccagtggacagctcatgcagcgtgcgcccccgcgcccgcgacccagttcatcgccgggaatgggaaggacggtaatgccggctttgtcgtatttttcgttggtccagatgttgcgctcatagcccaccaccacgcctggacgcagggtgagcacgttattggcgtcattccactgttcgcgctcagcttcaaatgcgtcgccgccagtggtgattaagcgcacctgatcgatgccaagcgctgtttcaagagcatgaaccagcgtgctctcctgggttcgtttcagaccgccgcgtccgtctggcgtcagcgtccagcactgaacgtccgggcgaacgacttccggatagacggagaaggtgtcgatatcaatgtgggtcatgacggtgtcaaggtgcatacaggagcgatgttttggcagttcaacggcaatgacgcgttccgcctgacgatgtttaaacaatgcctgcgccaggaactcgacgccctgcggcgtagtacgttcagacataccgatcaacaccgcgccgcggccaatcaccagcacatcgccgccctctaaagtggcgtggtcgtaattaatgtcctcgtcgccgaaatatttaatgaaatcaccgcctgcgaattgaggatgccagcgataaatggcacgtaaattattcgtttcacgttggcgtgcaggtttcgccatggggttaattgagacgccgttatatatccagcaggacgtgtcacgggtaaataggtgattcggtaatggcttcataataaagtcattaatatcgtgagtatcgaccaccatattttttatggaggcgggaatttcgccgtaagttaaaccgccgcttaaatggcgagccagttcacggtgcggcatatccgccagccaggcgcgaatatctgcggcaaaggtgggcccaaggcgataatcggaaatttgcgtatccagtagccaggctttagcgtcagccacatccagcgtttgggtgagcaggtcggttaacagcaacacttctatcccttgctggcgcagcgtgttggcaaaaatgtcatgctcttcgccagcgcgctctacggataatacatcgtcaaaaagtaattcctgacaatttgaaggggtaagtctttttaggctgagattgggccgatgcaacattacgctgcgtaattgaccgatttcagaaccgacaaaatgcttttccatcattataccttttacataattacaagaataaagaaggagtggctgcaaatatttagcgtgcttgcagtcgcggcgtttcagttaaattcgggagcaatgattgaattttatttgggttgttaatgtgatgagattcacatcaatcaaggagtgctatttttcttacttaatatatgaaccgggtcagagaaattcaaaaaacaataaggcattaaatgaattactacgcagctatatggtttgttatttttctattgttaattatttgtttgctgtattgaatgatatttaaatcttaactcattgaaaataaagtgattatttttaatggttgcataactatgcgtgagggggattttattatcggggatatttaaataatttaaaaataactatggatagagaagtcatttatgcagggagagcgaattgtgatcgctaaaacgtttttatgttaacgcctttaatatcaaagcattgttagtgatggcaatttggcgccgctggggtttatgcataggcactgcataaagttgggcgaactattaacaatatagaaacaccgctggcgataaacatgcgctggcgcaaaatcgatgagagtaagggtagtatggcagccatttttctcgtataaagagaaaaataaaacgctgttttaactaaggggatgcgatgattattggcaatattgaacatctggaggtctggctgccgacggcgttacggcaggcgattgagcacgtcaatgcgcatgtcacgacaacgaccgcgccaggtaagtatgacattgacggcgacaggctgttttatatgatttctgaaaatatgacggagccgggcgaatcgcgcagcgcagagtatcacgctcgttatcttgatattcagattgtgctacaaggtcaggaagggatggcattcagtacccggcctgcgggaacgccgcacacggactggctggcggataaagacattgcatttttaccgacgagcgtcgacgagaaaaccgtcgtcctgaacgaaggcgactttgtggtgttttatcccggcgaagtgcataagcccctgtgcgcggtgggagaaccggcgcgggtacgtaaagcggttgtgaaaatgctgatggcgtaatattttgtgccggatggcggcgcctgcacgttgcgatcttgtaggccaaccgccatccggcatcatcacgacattatttagacagcgtcgctaccattactgctttgatggtatgcattcggttttccgcttcatcaaagacaatgctggccgcagactcaaaaacctcgtcggtcacttccatcccgccatgtaaaccgtactcttcggccatttttttgccgagcgtggtttcgtcatcatggaacgcaggcagacaatgcaggaacttaacctgcggattgccggttaaggccatcatctggctgttgacctgataatcacgcagcagggcaatacgctccgcccatttctctttgggttcgcccatagagacccaaacatcggtatagataaaatccgcgccttttacgcccgaggcgatatcttcggtcagggttatggcgccgccgttctttttcgccatggcgctgcactccgccactaacgcggcttgcggccagcaggcttttggcgcgaccagacggagatccaatcctgttaacgcggcggcttccagcatggagttacccatgttattacgcgcgtcgccggcatagaccaacgtcatctcgttaaaggctttacccggcagatgttcctgcatggtaagcagatccgccagtaattgcgttgggtgatactcatcggttaaaccgttccataccggcacaccggaatattcagccagcgtttcgacgatctcctggccatatcctcgatactgaataccgtcaaacatccggcccaggacgcgggcagtatctttgatggactctttatggccgatctggctcccgctggaacccaggtacgtcacgcgcgccccctgatcgtatgcggcaacttcgaaagagcatcgtgtccgggtcgagtctttttcgaagatgagcgcaatattcttacccaccagcttttgttcttctttaccgtttttcttatcggctttcagtttggcggcaagctgcaacagagcagtgagctcgctggcggtgaaatcaagtaactttaaaaaaggtttttggtaaaacgtagacatacttccctcacatggcttaggcctctcattgaattaaaattcactttatatggatgattattcatttgcaactctgtttgataaaacttttctcgataaggtggaggcaacgtcggcggtatgtgacaataagagtatcggcaggacatctatgaggaacgagctatggcaaacccggaattactggaagagcagcgtgaagaaacgcgcttaattattgaagagttacttgaggacggcagcgatccggatgcgctgtacactatcgagcatcacctttccgctgacgatttcgaaacgttggaaaaagccgcggtagaagcctttaaactcggctatgaagtgacggagccggaagagctggaagtggaagagggcgatacggttatttgttgcgacatcctcagcgagtgcgcgttgaacgccgaactcatcgacgctcaggttgagcaactgatgaacctggcggaaaaatatgatgttgaatacgacggctggggaacctatttcgaagaccctaatggcgaagagggtgatgacgacgattatgtcgatgaagatgacgacggcgtgcgtcactaaagctgcatagtatgacggtacggcagcgtctgctgtcgtatttttttaacaggttacgtatgaattacccgcaaatactctctccggtgcttaatttcctgcattgcccgacgccgcaggcgtggattgtccaggcccgcgatccgcaaaatcttcctcttctgcttaccgatcacctgatctgcgaactgaaggctgcgcaaaccgcgttgctgttggtgcgtaaatatgtcgccgataaatcgggcgccgacgcgctgctctcctggctgcaaccttacgaggcgttcgcgtttcgtcaggggccggagccggattttgttgccctgcataaacagattagcaaaagcgccatgccgcaaactgatgacccctggggacgtcagcttatcgaccgtatggtgttattgattaaagaggagttgcaccatttttggcaggtacgcgaggtcatgcaggccagaaacattccttatgtgaaaatcaccgccagccgctacgcgaaaggaatgttgaaagcggtacgcacgcacgaaccgctcaccttaattgataagctgatttgcggggcgtatatcgaagcccgctcctgcgaacgttttgccgctctggcgccctggctggatgaggatttacagacgttttatctctcgcttctgcgctccgaagcacggcattatcaggattacctggcgctggcgcagcagatttccgccgaggacatttctgcgcgcgtgcgctattttggcgaggtagaagctgaccttatcttgtcgccagaccgcgagtttcgttttcatagcggcgtgccagccgccggataaagggtaaaattaaagattagcgtttttatcttttacgctgtcgccacctgcgtggtcatccgcccgacatcaaactgctggcgagcagaaaaagtcattttcatgatattctgtcctgagtaaagcctgccctgcggcaggcaaaaagaactcactcagtgttatattcccgaaaggtgaccgtgaacaatgccatttttgcatcatcactacgggttcttgtgttgaaatacttactgtttcacgccttttgacgcttcagagcaggtcttgccaacaaaggtttgtttaattttgttgatggaggttgttttattacctcctgcatcgacatccgatttcatggtcatcgcaaattctgtatcgcttattttcgtcgtttctacaatagagtgcgatttgacatcaggattattacagacagtctcattgatcagtttggtatccgtactttctacaaatgttgtcgtgcaaccgcctgcactggtagaaaaacccttcaccatttttttagaatcttcagacattttaggggtataacacataagcgtcgctatgcccgaatttttttcatccattaatacttcttttgtatctggattgatggtgcgcatttctatattttccattttccattcgccgggctgtatatctaatgcatatacattagagatactaataaacatagcggggaaaacaattgctgataataggcgtttcatttataacttccttgaataataagtgattcccggataacaggatgtttccgggattatttatatcagcaaaaataatacctggcgaggataaataaacgcctggttttcagagatcctttaacatcctcacttcgcaatcgacatgtccggtgcagccgagcggttcgctaatatgttcaaatcctaaacgttcgtatagcgcaatcgcctcgcgtaaaaaagccgttgtttccagatagcagcgtttaaaaccctgttcacgggcatgatccagcgccatcagcgccagctttttcgccagcccctggccacgaatcaccggtaaaaaatacattttttgcagttcacaaatgtctggttcgctacaggataacggcgccacgccgccgccgcccaccacacaaccgttttgctctaccacccagtaggccgcgcccggttggctataaacctgatacagttcatccagattggggtcggcaacggtataacctttatcggcggtaagtccgtattccgctgaaacctgacggatgacacgggcaatagcggcattgtcggcggtagtgattcggcgcaccgtgagcgttggcgaggcgacattattcataatatggctcaatttttaaaatttatttatagattactttaataccaccgtcttgagttacgcgcaaggagatcctgaatcagacaaaataaaaggcggaaaaattaaacaaaaatagtatcgtagtcaaatcagtaacagtttactggtttttattattaattctaatagattgtaattcagggatatgattcatgaataacgttatcagtagtaaagataaccataatcacacgttggtgtttacaggcaagggcggaaagtattttgttatttgccttgtgaatttcttgttgacgtgtatcacgttgggaatctatgcgccgtgggcgatggtgaaatgtcgacgttatatttatactaacatgacgctaaacaatcagccttttgcttacaaagccacgggcggcgcattatttattagtgtgttgttagtttttattatttatattgttagcctctctcttattgaacacggtcatcccggtctcggttttacgctattcggcttattaattgcgattattccttttatggcggtgaaaggattacagtatcaggcgatgatgacttcgcttaatggcgtacattttggattccagtgttccatgcggcgcgcctggtggtacatgttcgctcttcctgtactcctgatggtggcgctttatattgttctttatattatctcactggtaaccatcgccgtcggcggtttagtgttcagtatcgtttttctcggtttgctggctattattgggataggggtcattaacggtattacctacagcaaatggatgaccttgtttggtaatggcgcaaactttggcattcatcgtttctcgattcaggttaatgttaaaacgtgcatcagagggtgcgtgttggcaatgttgacccttttcccttttgctgtcgtgattggttatctaatcgcgccggtgttcaccgacatgattcttttgagtatgatggggaatgcgcaggcaggaggggcgcttattctgcaatattatggccagataatggcatgttatttcctctattttctcgcgattattgtggtaaccagttacttatatgtggcgttacgcaacctgtttttaaacaatttgtcactggcgaacgattcgattcgttttcattcctctgtcactgcacacggtatgctgtggcggttactggtggtgtttgtgatttccggcgtgaccttagggctggcttatccgtggttgaaaatttggctggtgagctggctggcgcagaatacacaggtccagggcgatctggattcgcttgagttaaccaatgatgagaagccgctggaaaacagcccgctaatgtggatttctcgtggcattatgccttacttcccgtttatctgatgtaaaaaggccgacgtttacgtcggcccataattcatgttgtcggatggcggcgtgaatgccttatccggcctaccgatcgcgccatgtcaataagcgaacgtgtaggcctggtaagcgaagcgccatcaggctttcagattacagcgcgctaataaccgcctgctgctcaatcagtttcgctttggcttctgcgtaaccgtccagcttctcacgctctttggcaatcaccgcttccggcgcacgggcgacgaaaccttcgttggacagtttgccttcgatacgggcaatctcgccttcgattttcgccacttctttcgccagacgcgccagctcatcgtctttgttgatgaggcctgccatcgggatcagcagttcggcgccgtcgatgattttggtcacggaaaccggacctttgtcatcggctggcagcacggtgatgctttccagacgcgccagggtttgcaggaagctacggttgtcgttaacacgacgaacggcttcttcactacagccgcgcagcagcagttccagcggtttgcccggggcgatgttcatttccgcacgaatgttacgtaccgcgacgatcgcctgcttcagccactcggtatcggccagcgcggcttcatccacctgtgcggcgttatattccgggaacggctgcagcataatggtatcggcggtaatgccacagataaccttcacgcgctgccagatggtttcggtgatgaacggaatgatcggatgcgccaggcgcagcagaccttccagtacggtgaccagcgtatggcgggtgccacgcagttcagactcggaacccccggtcattaccggcttggtcagctccagataccagtcgcagaactggttccaggtgaactcgtacaggatgcccgcggcgatatcgaagcggaagctgtccagcgcgtcgcggtacgctttaacggtctggttgaattccgccaggatccaacggtcagccagcgacagcgtcatttcgccgccgttgaagccgcaatcctgctcttcggtgttcatcagcacaaagcggctggcgttccacagcttgttacagaagttacggtaaccttccagacgcttcatatcccagttgatgtcgcggccggtcgaggccagcgccgccagggtaaagcgcagggcgtcggtgccgtgcggctcaatgccgttcgggaactgcttctcggtacgcttgcgaattttctccgccatctgcggctgcatcatgttgccggtgcgtttttccagcagttccggcagggagatgccgtccaccatatccagcgggtcgataacgttacccttggatttggacatcttctggccttcgtcgtcgcgaatcagaccggtcatgtagacggtatggaacggcacctgcggcttgccgttttcatctttgatgaagtgcatggtcatcatgatcatgcgggcaatccagaagaagatgatatcgaagccggacaccatcacgctggtggggtggaactgacgcagggcgtcggtgttttccggccagccgagggtggagaaagtccacagcgcggaggagaaccaggtatcgagaacgtcttcgtcctgacgaagcgcaacgtcggcgccgaggttattttcctgacgcacttcgtcttcggtacggccaacgtagacgttgccgtcgttgtcataccatgccgggatacggtgaccccaccacagctgacgagagatacaccagtcctgaatatcgcgcatccaggagaagtacatgttttcgtactgcttcggcacgaactgaatgtcgccgttctcaaccgcttccaccgccggtttcgccagcacgtcagcacggacgtaccactggtcggtcagcatcggttcgataaccacgccgccacggtcgccgtaagggacagtcagatcgtgcggtttaatttcttccagcaggcccagcgcgtcaacggcagcaacgactgctttacgggcagcaaagcgttccagcttctggaactcagccggaatctcgctggaataaacgtcagactcttcacctttggtatcgaacacttccgcgctttcgcggatgtcgccgtcaaaggtcaggatgttgatcatcggcagggcatgacgtttcccgacctcatagtcgttaaagtcgtgcgccggggtgatcttcacgcagccggtgcctttttccatatcggcgtgttcgtcgccaacaatcggaatgcggcggttaaccagcggcagaataacgaatttaccgataagactctggtagcgcggatcttccgggttcacggccacgccggtatcgccgagaatagtttccgggcgggtggtggcgacaaccagataatctttaccgtctgcggttttcgcgccgtcggccagcggatagcggatgtgccacatcgagcctttggactcgcggttttccacttccaggtcagagatggcggtgcgcagtttcgggtcccagttcaccaggcgtttgccacggtaaatcaggtcttctttgtacaggcgaacaaagacttctttcacggcattggaaaggccttcgtccatggtgaagcgctcgcgctcccagtcaacggagttgccgagacggcgcatttggcgggtaatggtgccgccggattccgctttccactgccagattttgtcgataaacgcatcgcggccgtagtcgtgacgggttttaccttcttcagcggcaatcttgcgctcaaccaccatctgggtggcgatcccggcgtggtcggtgccgacctgccacagggtgtttttaccctgcatacgctggtaacggatcatggtatccatgatggtttgctggaaagcatgtcccatatgcaaactgccggtgacgttcggcggcgggatcatgatgcagaaggactctttgctttcgtcgccgttaggcttgaaatagccctgcttttcccagtgctcgtaaagcggctgttcgatatcttgggggttatatgtcttttccattatttccaggttgccgtattcaggttaaaaccagccacgcggtaggctttgtagcgttcgcgcgccagttgtttcaaagtttcttcgtaagggacgaagtctaccacttctgtgaaagcggtggcaaaatctgcaaagcttgtacgcaggctgattaaaatatcgcgcgggctgctgttgcgtttttgcggccaggcgatttcaaccggcgcgccgccgcgtgggccttcgcctgccagattgtgcgggacaaaactttccgccggtcttgcccacagcgcttcatccagccgaatggcctgcttctcatcttcgcaggcgatcagcacgcgcttgcccgcgcgccaacgttctgcggcaatttcacacaccagttgttcaacggcgcttaaaccgttgacggtggtgtcattatccagaagatagaacgtcgcatttttcatatatggggcttcttgtggtggatttaaatgcgttgtcatgatgcctcccgtaggccggataagcgcagcgccatccggcaaaacgcctgatggcggcgctaatgcgccttatcaggcctacggggtaatctcaaacttactcttcgccgttaaagcccgcacgattgagcaggaactgcgacagcagcgctaccggacgacccgtcgcgcctttcgctttgccggaacgccaggcggtaccggcgatatccaggtgcgcccagttgtacttacgggtaaagcgcgacaggaagcagcccgcggtgatagcgccgccaggacgaccaccaatgttcgccatatccgcaaagttggactccagttgttcctggaactcatcgcccagcggcagacgccacgcgcggtcgcccgcttgctcggacgcgccgatcagttcatgcgccagcgggttatggttcgacatcagaccggtaatgtgatggcccagcgcaatcacgcaggcgccggttagcgtcgcgacgtcaatgaccgcttccggttcgaagcgctcaacgtaggtcagcacgtcgcacaaaaccagacggccttcggcatcggtattcagcacttcaaccgtctgaccggacatggtggtcagcacgtcgcccggacgatacgcgcgtccgcccggcatgttttcacagcccgccagtacgccgataacgttaatcggaagctgaagctcggcgaccatacgcatcacgccgtaaaccgccgccgcgccgcacatgtcgtacttcatctcgtccatcccttcagatggcttgatggagatgccgccggagtcgaaggtcaggcccttacccaccagcacgatcgggcgcgcgtcttcggacggattgcccttgtactcaatcaccgacatcagcgattcattctgcgaaccgtggccgaccgccagataagcgttcatacccagttcgcgcatttgctgttcgccgatcacgcgggtaatgacatttttgctgtagctgtcggccaactggcgcgcctgtgacgccaggtaggcggcgttacagatattgggcggcatgttgccgagatctttcgcagccttaatcccggcggcgatggccagaccgtgctgaatggcgcgttcgccgctggtgagctcacggcgggtcggcacattaaagaccatcttacgtagcgggcggcgcggctcgctcttgttggtcttgagttgatcaaagctataaagcgtctctttggccgtttcgacggcctgacgcactttccagtagttgttgcggcctttgacgtgcagttcggtcaggaaacagacggcttccatcgaaccggtatcattcagagtatttatcgttttctgaataacctgcttatactgacgttcatcaagctcgcgctctttgccgcaaccaatgaggaggattcgctcggaaagaacgttaggaacatggtgcagcaacagagtctgccccggttttccttccagttcgccgcgacgcagcaatgcgctgatgtatccgtcgctaattttgtcgagctgttctgcaatcggagaaaggcgacgcggttcaaagacgcccacgacaatgcaggcactccgctgtttctccgggctaccgctttttacactgaactccatgcactatgctcctgaatcttaaagacaacagtggtggctacagctatactcgtcgtctttcaagttgcagatgcgttggctgcgcctgctcacccctgtcgcttacctgatgtaagctccggggcttcacagtcttgccgcctgcctgcaactcgaaatccattagagtatagaaattgaaagctttcgtaactcatatccgctgttgcggtgacttcgtgttaatcttaacgttattacggcattggcacgtcagaacaagttctgagaggtgaatccgctgagtataatgatcttagcgatgatttcgacgactcaagagaataaatgacgtttaagccatgaaacaagctaaattccagcaaaaaaatgggtttttacgggcgtatttaaagtgataatcataagatatctggtgcgggagacgctcaaaagccagctggcgatactcttcatcttacttttgatcttcttttgtcaaaagttagtgaggattctcggcgcggcggttgacggcgatattcccgcaaatctggtgctctcgcttctggggctgggcgtaccggaaatggcgcagctcatcctgcctttaagcctgttcctggggctgctgatgacgctgggcaaactgtataccgaaagtgaaattacggtcatgcacgcctgtgggttgagcaaagccgtgctggtaaaggccgccatggtactggcgttatttaccggtatccttgcggcggttaacgtgatgtgggccggcccctggtcgtcaaaacaccaggatgaagtactggcggaggcgaaagcgaaccccggtatggcggcgttggcgcagggacaattccagcaggcgaccaacggcaactcggtgctgttcatcgaaagcgttgacggcagcgacttccacgatgttttcctggcgcaaattcgccctaagggcaatgctcgtccttctgtagtcgtggccgattccggacaccttactcagttgcgcgatggttcccaggttgtcaccttaaacaaagggacgcgttttgaagggacggcgttgctacgcgattttcgcatcaccgacttccagaactatcaggcaattattggccatcaggccgtggcgctggacccgaacgatactgaccagatggacatgcgcacgctgtggaataccgacaacgatcgcgctcgcgccgagctgcactggcgtatcacgttagtctttaccgtatttatgatggcgctgatggtcgtgccgctcagcgtggtgaatccacgtcaggggcgtgtcttgtctatgttgcccgccatgctgctttatctgctgttcttcctgatccagacctccattaaatcgaatggcggtaaaggcaaactggacccggttatctggatgtgggcggtcaacctgatctatctggcgttggcgattggtttaaacctgtgggatacggtgccggtccgccgcctgcgtgcccgttttctgcgtaaaggagcggtataatgcagccatttggtgtacttgaccgctatatcggtaaaaccatttttaccaccatcatgatgacgttgttcatgctggtgtcgctctccgggatcatcaagtttgtcgatcagctgaaaaaagcggggcagggtaactacgacgcgctgggcgcgggtatgtacaccctgctcagcgtacctaaggatatccagatcttctttcctatggcggcgctgcttggcgcgctgctgggactggggatgctggcgcagcgtagcgaactggtggtgatgcaggcatcgggtttcacccgtatgcaggtggcgctgtcggtgatgaaaacggctatccccctggtgctgttaaccatggcgatcggcgaatgggtcgccccgcagggcgagcagatggcgcgtaactatcgtgcgcaggcgatgtatggcggttcgctgctttccacccagcaaggtctgtgggcgaaagacgggaataactttgtctatattgaacgggtgaagggcgacgaggagctggccggcattagtatttacgctttcaacgatcagcgtcgtttgcagtcagtgcgttacgccgcttcggcaaaattcgacccggagcataaggtctggcgtttgtcgcaggtggatgagtccgatctgcaaaacccgaaacagatcaccggttcgcagacggtgagcggcacctggaaaacgaatctgacgccggataagttaggcgtggtggcgctggacccggatgcgctttccatcagcggtctgcataactacgttaaatatctgaagtcgagcggacaggacgccggacgttatcagctcaatatgtggagtaaaatcttccagccgctctccgtggcggtgatgatgctgatggcgctgtcgtttatctttggaccgctgcgtagtgtgccgatgggcgtgcgcgtggtgacggggattagcttcggcttcgtcttttacgttctcgaccagatttttggcccgctgacgctggtatacggcattccgccgattgtcggcgcgctgctgccgagcgcgtctttcttcctgattagcctctggctaatgctgcgtaagtcgtaatcacagtaatcgtaggcctgatggcgctgcgcttatcaggcctaccatgacccgtaggcctgataagtcctttccgccgccatccggcagaccgcctggtattcctcgaatgatgtagtgcgtaacctgacgcgtggcgcttttggctacgcgttaagctcaggcaagctgcgggaaaaagtagaacaaaaaatttataacgtgctgccgtgataaatctgataacccaaatcaatcgtattatggttgagatcgttatttttaattttgttgagcaacatctgcgcggctctgcgcccgatctcaaaacgaggggtaattacgctggcgaggctcggtatcatttgcctgcccatctccagaccgtggaagccggcgatggagatctgctccggtacggccagttgacgctcgcggcaccacagtagagcgcccattgcgatatcgtcatttgtacaaaagacgccatccacgtccgggtgcgcagtaagcgcatcacgcattagctgtatccccagatggatagaggagatagcgcgtggattgatgcgcaacggcgccagcccccggcgcgtcatcgcatcgcagtagccgtgataacgctgctcatctcggatatcgtcttttgaacccagatagaggatttttcgccgctggcgtttatccagcatggtgctgaccatatcaaaggcggcctgacggttatcaaaccccacctccatatctaagcgatcgccctggatgtccatgagttctacaatcggaagggtagctgagcgcaggaatttgacggttctgagggtatgatatttttctgaaagaataatgccgtcgatattgtaagacagtaaattgataacggactcttcttccgaatcgcgattgtaattgtaattcgcaatgagagtttggtagttatgacccgacgttacggattcaatcccggcaagaatgtcggcaaacaactggttctggaaagaggggatcagcacgcccagagtgtaactttgcgcgtttaacagcatagctggcgcgcgatttggtatgtagttaatttcctccatgatctgcgcaatacgctcgccggtttccctggcgacttttttcggcgagcggatgtaacggctcaccgtcatttttgtcacgccagcaagcgtagcgatatcctgcaaagaaattctgtgattcctcatgttttctccagtaccggaggcgggaacgtcgcccccatggttaattgggctgcggatgatgaattaatgcagaaccgcattcagcgccagtacgcccagcaaccccatgacagaaatcaatgtttccataacggtccaggtgcgtagggtttccccgacgctaagattaaaataccctttaaacagccaaaaaccgggatcgttaacatgtgatgcaataacgcttcccgcgcctgtcgccagtaccattaacgccggatcggcgtgggttacgttaataatcggcaatacgacgcccgctgtggttatcgcagccacggtcgcggaacctaacgcaatacgcagcacggcggctaccgtccagcacattaataacggagatagcgaggtgccggtcattaattgcgagatatattgacccacgccgctatccaccagcacttgcttaaacgcgccgccgcccgcgatgataaaaacaatcatcgcaatagcgccaatggactcgccgacgatatccatcacctgctcaaccgtacgtccgttgcgtcggcccagcgtaaaaatggcgatgataatggcaataaacaacgccactgctggattaccgataaattcgaagaaaacccgcacggcattcgtttttggcagcgtgatttcacataccgctgcgatggccatcagaatgaccgggatcacggcggcaaaaatactgttccagaatgacggcatctcctcttcactgaataggtgaggattaaataatccttcaggcggcgctttctcaaagcgcgccagcaattttgaaaacagagggccggcaacaatcacggtcggtatggtaatgattaacccatacagcagggtcgtaccgagatttgcctcaaaaattgtcgcaatagcagtagggccgggatgcggcggcaggaagcagtgcgtaacggataaggcggcgaccattggaaccccgacatacagcaagggcagtcccgatgaggccacaatcgtaaaaacgagcggcaacagcagtacgaatccgacttcaaaaaacattgccaggccgacgataagcccggtgatcaccagcgcccattgcacgcgttttttgccgaacgtattaatgagcgtcgtcgcaatgcgctgcgcggcgccggtatcggaaattaatcttcccagcatcgcgccaaaaccgaggatcatggcgagtccgcccagagtaccgccaattccgttttgtatggagtgcaggacgtcttgcgcgcccatcccttcggcaaatcccaccacggcggcaaccagaacaagggcgataaagccgttaactttaaagccaatcattaaaaccaacagcagcgcaacgcctgccgcaataattattaatggcatattcgtctctcttattagcgccaaaatagcagcgcttacgcgctgcgtcgtatttccctggtcagacggcaaccagcataccgccatcgacaaacagcagatgtccgttaacaaagtcggaggcttttgacgagagaaacaccgctgcgccaataagctcctggggatcgccccagcgtgcggcaggcgtacgtttgcatagccaggaggtgaaggcttcatcttcaaccagcgctttggtcatctccgttttgaagtaccccggcgcaataccgttgacctggatattatgacgcgccagctccacgcacatgccgcgagtcagcatcttcacggcacccttcgacgcggcgtatggcgtaatcgtgtcgcggcccagctcgctttgcatcgaacagatgttgatcacttttcctgcctgccgcgccaccatacggcgcgtaacggcctgagagacgagaaaaaccgcggtctgatttacggcgatgacgtcattccactcctgttcgggaaactcagtaaacggatgacggcgctggataccggcgttatttatcaggacgtcaatgacgccgatatctttttcgatatgttcaaccgcagcttcaatatcctgtttatgggtgacattaaaaggagcggcaatagcctttatcccttcctgctgaagtttcgtcacggctgtttcggcgcgctccggggtgatatcgttaacaataatgcgcgcgccatagcgaccaagaccggtcgccagcaaataaccaattccctgagcggctccggtgataaggatatttttacctgccagtgaaaaaagatcgttcatgatagtgtcccttattttactttctcagaaaacgagctgaacttttgccgcctgtgttttgtctccggcaaagatcagcgccgcttccaggtcggtaaatggatattccgcgctcagtaacggcagcggattgataacgcggttggcaagccaggaaaccgcagtattaaattcggtagtaaagcggaaagagcctttcagggagatctctttgcttattaccatcatcatcgggaagttgggaactgcgccgcccatgccaacctgcaccatcacgcctttggcccgtgtgacttccagacacgttgagatagaggaaggatgcccagagacttcaaaactgatatcgaaataccctttttctgctttccagtcatcgagagaatcatgctgtgggttcaccagcgtatccgcgcccatctgccgggccagcgagagagaacgggtactgatatcggcacataccacttccgccgcgcccagcgtttttaccgcgctaacaatcaggcagccgatagggccaacgccggagataaagatgcgtttgccctgcagatcgcccgcctcatgagctgcatgaatggcaaccgccagcggctcggcaaaggccatggctttttcgtccgcctgttccggccagggaatgcactgagcggtatcgacagctttaaatcgggtaaaaccgccatcgacatgcggaaaatacatggcgctgccaaagaaacgcatttcagtacagtggttttcttcatgctgcagacagtatttgcaatgaccgcaaggctccgatggattaattgctaccggttgtccttcacgtaataaatctgagtcgctatgaacgattttgccaatcacttcatgacctaaaatcattggcgcttttactgtaaaattgccgactttgccttcctgataataatgtaagtcagacccacaaatgccgccacgggtaatttgtacgagagttcctttattattccattcaatattttgttccgtaacggcaacagcacgcttacccgcaacaacgcaggattgagtttttacttccataaattcctcactggtcaggtagttaccctgaacgcatttaagcggttttatttgtcactatttgtgacttatgtcacgctggaaaattgttacactacaatgttacgcataacgtgatgtgccttagagttcttctctatggaaattaaaaaacgtgaaattgtcgaacgtagaggcgtaatattgtgttgtggaatatgactcagaggtatttaaatggccggggaaagctatattttaatgggtgtttcaggtagtggtaagtctttaataggcagcaaaattgcaacattattttctgcgaagtttattgacggcgatgatctccatccggcgaaaaacattgataaaatgtctcagggaataccgttaactgatgaagaccgcttaccctggctggaacgattaaatgacgcttcatacagtctttataaaaaaaatgagacgggatttattgtttgctcgtcattaaaaaaacagtaccgcgatattttacgtaagagtagccctaacgtacatttcctgtggctggatggcgattacgctactattctgcagcgaatgcagcgtcgtgccgggcattttatgccgccagacctgctgcaaagtcagtttgatgcgctggagcgaccctgtgccgatgaacatgatattgcgcgtatcgatgttaatcatgacatcgagcacgtgacggagcagtgccgactggctgtacaggcttttcgtcaggcactcagcgcttcctgatcattgtcaaagcgctgagtcaggcggtcagaagtcagcttttagcactacacgatagcgggctttgccgtcgcgaacgtgctggatagcctcgttgatttgtgacattgcgaacagttccgtggtgggcgcgactttactgcgtccggcgaatttcatcagtttgcgaagttcatatggcgttccggttgccgagcctgagatactgcgatcgccggcaattaatgtaaacgccggtacgggcagcggcttcaataccgccccaacggtatggaagttgccgccataggtcagcgcttcgaagtagggttgccagtcgagatcgacgttaaccgtgttaataatgagatcgaactgacccgccagtgcttttaacgcttccggatcgcggctgttcaccacgttattggcccccatcgccagcacttcctgctccttcgatggatttgagctgaacgcggtgacttcgcagcccatcgcgtgtaacagctttatggcgatatgccccagcccgccaataccgatgacgccaacgcggctggtagcagtaatatggtgcatcaatagcggtttaaagaccgtaatgccgccacataacagcgggcctgcggacgccatatctatattctccggaagaggaattacccactgccagcctgcgcgaagcttctcggcaaaaccgccacgattgaggatagtgggcactgcgccttcctggcagttaatttgattgccgctgatacaggcatcgcagtgtccgcagctgcgcgccgtccagccgattccaacgcgctggccgacttttagccccttatcctgtgccgcgctgccgagtgcggccacccgaccgatgacctcatgtccggcaaccagagggtattgagagaacccccattcattgtcgatcattgacagatcggaatggcagatcccgcagtagtcgacccgtacctcgacatcttccggttggagttctcccgcgtcatattcatagagttcgagctcgccgcccgcctctttggcggcatagctttttattatcgtcattgtgtttcccttaatgtggtgttgaactgaaaagtgtagagcatggaggcaagggacgcccggcgttaatctgctggagaaggcgggaagtagcctgattattctatttaatactcaacgctgctgaaattttcagcacttagcgatacaggtgtatgctcgtgcttgcatggtggcgtatgacaggtataatccacaacgttttccgcatacctcttcagtgccgaagtggcgaaatcggtagacgcagttgattcaaaatcaaccgtagaaatacgtgccggttcgagtccggccttcggcaccaagtgatgcaataattagctgcctaatggtggctttttttgtgtccatttccgtccaaattcgtccatatccatctgtaattcaaagataatttatttttctgtaatagatatatttattttgtggtctttccgtgttggtcgtttttcatccattaacatccacgcgatctgggggcaaaaaggggcaaacccggttcgatagaggagtgccccccaaatggcgcttacagatctcgcaatccggcatgccaggctgcctggcaaggcatacaggctctttgactgccacggtttttacattcaggtgaaccccagcggatccaagctgtggtatctgaaatttcgctttggaaacaaaaagaaccgtatggcattaggcccttatccgctcatttctcttgcactggcaagggagaagcaagcggatataagaaggcttattttagaaggtattaatccggcggaaaaacgcagagaggacaagcggggtggcgagcctctttaatacgttcgagtccgtagtgcgcaaatgcgtctccagcaacgtgaactggtcgacggaacattcgacagcgttattttctgagcttacaggttttccaatattgcactgaacgctatccagtcgggttcacgggcttctggagcgagctgcgcagccgataatcctctactgcttcagttataacgctattatgtgacatgcagcatgatatggtcgttttctgaactccgtataacctgagtatttgtattgaagcgtgaacaaaacattgcagccagcctttcaacgtggacaatagttattcatacggtgattttatattcgataaatcaatgggtttcattgaaacataggactggtaatggatgacaatgctttagggtttgcctcatactggcgcaattcgctggcagatgctgagtcaggaaagggcagttttgaacgcaaagacgccaaaaatttcacccactggcatgggatagcggcgggacgtcttgacgaaacgatcgttggtaaattttttgagggagaaaaagacgacgtcgaaacagtcgatgtcatcttgcggccaaaggtttatttccggttactgcagcgtggaaaggaccattccgctggtgcgcctgatattgttaccccgatagtgacgccagccctattgagccgtgaaggttttttatatccgacgccagcgacctccattcccagagacctgcttgaacctttgccaaaaggggcattttcaattggtgagattgagcagtacgacaaatacaaaacgacacatacgtcattctctatcaactttgatgaccgcgttgataagaccgccgaaacagatgaagaacgagaagcacgatatgcagcctggcagcaggattggcgtcaatatctggatgattcagaaaggctgctgaagaacgttgtcggcgactggattaaaaatcctgagcaatatgaactcgctgagcacggttatattgttaaaacggcgcaatctggcggcgccagtttccatatcctttcactttatgatcacctgcttgtttgcaaaaaggatgtgccgctcttcaatcgtttcgcctcgcgagaggttcatgctgcagagtcattacttcctccggaagcaaaattcagcgacaggattggacactccggggataagtttccgctggcaaaggctcagcgcgatgccttaagccattttctggatgcgaggcatggcgatatccttgccgttaatggtcccccgggaaccggaaaaaccacgctggtgctttctatcatcgccacgcagtgggcccgagcggctctcgaaaaagcggaacctccggttattatcgcgacttcaacgaataaccaagctgtaacgaacattatcgaggcgttcgggaaagatttttcccaaggcactggtgcaatggccggacgatggttgccggagctgaaaagcttcggcgcttattttccctcaagcactcgtaaagccgaggccgccaaaaaatatcaaactgaagatttcttcaaccaggttgagtcaaaagagtatgtagaggatgcactgctgttttatctggagaaagctaaggcagcctttcctgaaaaagagtgttcatcccctgaaaaggttattgaactcctgcatggtcagttggcagcaaaatccgagcaactggtaagactgaacgcaacatggcaaacgttaagccaggttcgggcaacgcgagagcttattgataacgacattgagcaatatctcgataatttaaataaattactctccgggcaagaacaaaaagttactcaactaaaaagtgctaaagcggaatggaaaaaatatcgggccagtgaatcactgatctatccattattttcatggctaccagtggttcgcagtaagcggcagtaccaaatacaactgtttctcgaagataaattaggtgcgctgattgcgggaaatcaatggtcggatcctgaaaccatcgaacgtaatatcgataggttgcttaattccgccgagcgcgagcaaacaacctaccggcagcagattgactccgcgcatgaaatcgttcttaaagaacagcaggcggctcaggaatggcagaggctggcacttgatttagggcatgagggcgacgaggaactgagcttctcacaggcagatgagctggctgatacgcagattcgcttccctgcattcttactgacgacccactactgggaaggtcgttggttgatggatatggccggcattgatgatctgcagaaagaaaagggcaagaaaggtgctaaaggggtaacagctcgctggcaacgccgaatgaaacttaccccatgcgtggtcatgacctgctatatgctgcccggcaatatgcagataagtgaacataaagggcagcgtaaattcgagaaaagctatttatatgacttcgccgatttactcattgtcgatgaagctgggcaggtgcttcctgaagtggctgctgcctcgtttgccttagctaaaaaggcattagtgattggtgatacggaacagatcccgccaatatggagtattactcctgctattgatataggtaacatgctggcggaaaaaattctgtcaggcagtacgcaagaggagattactgagaaatatacggcaatcgcagagcttggtaaaagcgccgcatctggcagcgtcatgaaaatagcgcagtgtgcctcacgctatcaatatgatcccgaactggctcgtggaatgtacttatatgaacaccgccggtgcttcgataatattattggatactgcaatacgctctgctatcacggtaagttgttgcctaaaagagggtgtgaagagagcaatttaatgccagcaatgggttatctccatattgatggtaaaggagagctggcaagtagcggaagtcgatataatttgctggaggctgaaacgatagcggcctggctgacagataaccagcaaagtattgaagcgcattatggtaaatcgcttcatgaagttgtcggtatcgtgacgccttttagtgcgcaggtaccgaccatcaaacaggcgctggataaacaaggcatcagcgcaggcaccaatgaaacgtcgctcacggtgggcacagtccattctcttcagggcgctgaaagagcgattgttatattctcgccagtctattcaaagcatgaagacggcgcgtttattgatagcgataacagcatgctgaatgttgctgtctcccgagctaaggacagtttcctggtcttcggcgatatggacctgtttgagattcagccagcctcatctccgcggggattactggcaaaatatctctttgagtcagagaagaatgcgctcacttttgattataaagagcgtaaggatttaaaaactgccgagaccaaaatctacacactccatggtgtggagcagcatgataatttcctgaatcagacgtttgaaaataccgataaacacatcacgatagtttctccatggctaacctggcaaaaactggagcaaaccggttttcttgattccatgattacggcgtgttcacgtggtattaacgtcacggtagtcactgacagaagctacaacactgaacataatgattttgagaagcgaaaagagaagcagcagaaccttaaagcggcgctggagaaactgaacgcccttggtattgcgacaaaactggtcaatcgtgttcatagcaaaattgttattggtgatgatggtttgctgtgcgtgggatcgttcaactggtttagcgcgacacgtgaagcgcgatatgaacgatacgatacatcgatggtttattgcggtgataacctgaagggtgagattgaggctatttataatagtcttgataggcgtcaggtttagggcaggagtgtgattagccatcttatcagtgtttccccagggtaagatggctgtgaggcattttcagaaggaatcattgtggcgactaaaatgtggatgatccgcggtgatggcggaaaattgtacgatgacttcagagacaagcaggttgttgctatcggctggtcgcagctcgctccctatgtgaaaccgggatgctcaagagagcagttgtttacccggtatcaggagcttgagccacagactaagtcaggcacagttcgttccggtgcttcgcaggtctggcgctttgtgaacgagatgcagaaaggtgactgggctatcacttattcaccttctaatcggacttatttgatagggaaaatcgcctcagattttgagtttcatgccgagtggcttgaagatggcatgggcatcgcccgtaaagtgaagtggaacgcggaagagattaagcgtgatagtctgagtgatgcaaccagaaacacccttggctcaacgctgacggtttttcaggtgcctgattttgccgtgaatgaattagtgcagggcaaaaagcctgtctcagatgtcgtgccggaagtacctgtttcaggtgaagaggatgaggttgtttctaatcctctgcgtgacatggaaatgattgcctttgaaggcatcaaagatcgtatcaaccgtctcgactgggatgagatgcaaaatctggtcgcaggcgtgttacgcagcatgggatataaaacccaggtatcgcctgcgggtgctgaccgcgaaaaagacatcattgcttcgcctgacggttttggcttcgaaaatccgcgcatcattgttgaggtgaagcaccgacgggaacagatgagcagccagcaaatccgtagctttatcggtggccgtcataaagacgatcgcgggttgtatgtcagcacaggcggattcagcaaggatgcgcgctatgaggccgatcgctctacaatcccgttgacgctatggacgctggacgatttagtacgtgcgttagtggaaaactatgagcaggtggatattgaaactaagctgttggttccacttaagaaaacgtacttgcctgcatgaagggaaaccaggggttacagtaatcgtagtgatatttagactaatatgaattttaactaaaataacgacgatattgattttatcgaggagtttgacccactcctcgatatatttagtttactcccaacgccttataaaccgcatctacaggttcagagtaaaaactgacctggaatttggtaaacaactcggctggcacagtcggaatatctaccgcggaagacatcggcaaaaggacctttttcgcgccactatcgaaagcaagttgtaagctagccgccagatcctgaaccgggttgatcacaccaccgagcgtcatgctacctaacacgaccatttgttcctgaacgggtttcgccagtaaaacggaacacagcgcgatcagcgcggcaagactggtcgcggtacttggtccagtattgtgcaattcgactacgtgcaggtggtactcatgttcagaaaatttcgctgttgcgctaacgcggctgaggttgcctttgaaatagtcaaatccaacccggatggcttccttagccgaggtgcttgatcccagaccagaaacgctatgcttaccattgcctgcggtcatctgagtttcgaagcgatacagacccgtcatgccactttccgcttgcgtaaccaaatgcactacaccaggtttgggcatgccagcaggaattaattcgctgccaccctgttccggcacgctgacgaagaattcttccagcgtctcgttatcaatgtagctgaaatttacatcgaagaactccagaccgcccagctttttaagctgttctttgacgcgacggcgagcttccatggcgtaggtcaggcaaacacggacatcttctttgctgtaagaaccattggggtgaagaagtttcagtagaccagaaaccgtgcgccttaccgcgataacgtcgcgctggttgaggttattacccagcttatagaacttatcaatcgcgtcggagaagctgcgcttacgcatttcccgcatgtattcggcgagataatctgtgataaggccgtagcgattggtaaagaattccgggcgcattttcggaatttcccagccggggatataggcatggaagcggtcgaaaaacgccgtatcgatcatcgcggcagggaagggggctaacagatggctggttttgactagcgtctcaacgctttggttaatgttgccgacgaacaccatcgatgctttgccttcaatcgaatctcttccgcgggaaaacgagccagacgccatgtaatccttcatgatttgcacgccgtctttgtctttgaaagtgatccccgccacttcatcaaacgcgacgacatcccacatgccaaccaggccaatctggcggctggccatgttgtaaaacaggttggctaccgtggtttgcccgccggaaactaacagtgagtttggcgaacattctttatagacgtggcttttaccggtgccgcgtggacccagttcgcagacgttatagttgttttccacgaaagggatcatgcgggtgatcaggtgccacttggttcgctgctcaatgttagcgggttccatacccacggaacgtagcaggacatcaatccactggtcgcggttgaagtgcgtacgtgcggtaaatacctcttccatgtccatattgggcatctggataggtttaagcgtcatcagagagaagggcgacgttttttgtccttcctcaaagaagtagttcacggtgatcatgcaccagatgccgccggtcaacagcttctcgttgtccttgaccatctgcggcggaaccagtgcatctttaatgccgaggttggagagctgggcttcgtaaacgtctttcttctgattgagctttaccgatactttatcaatgatcttgtaggatcctcgctcacgaatgagcgatttcaccttctctgcttcatcagggcggacgtagttatcagccagaatacgcttaacgttctgcaacccttgctcgacgatctggtcatcgtcggaagcgcagtacataccgagcagatactccagcacatagaccgggacatttgccccttctttgagctgtttagtcaggtccttacgtactacccgaccacgaaaatgctgattcagcaaggcgtccagatcgtaaccttctgcgacgagttccccttcggatacagctggaacgggtaagtcatgatgggtttgcatagcgcctcacttaaaagaaatcatcctgaaatgccagatcgataatcacagggtacttctggtaacccgtttccgtttgtgcatcttccagtatcagccagtattcattacggcgattgaaattcgcgccaatcagcttcagcgtcacgtcacgcacgcgtttttccattgtgttgttatcgctgtcaaagcagattcgctctttaccggataccacattattggcgttatcgacgatgaagatgttcagagtacgtggttcgtataactcacctaccggatgggtttgcagcaggctgactttatcaatgttattgacgagtttgatcagcggatgatgcttgacgatgtctaccggacgacgctgaggttgcttctcggcagccgttttctgcagtgctttcacctgcaatacgggaacgcagacttcctgtagcatggcgccaccatggacaaaccgcgcgccgcccgagaaatggaaacgctggatccctttcgggatcaggaactcgctgttatcgctgacgcctgcggtatccgccacttttcctttccagcaaaaatcatcggcaggaagctgatgaccgataataaagcgtttgtggtttttaatcgtattgtctggcttgatctgcagcgtggttttatcctggccggaaaggggctgctgctggaacaggaaaccgtggtccgccgtgacgataatccgtgtaccgtggagacggtttattacacgagtcactaaatccttcagttcaaccaccgcgttacggcacgcttcgaaggtcttctcctccgtcgatgcgctgtcacccatggcatcaatggtgttatgccagatataaacgacttcgtaatcgcgaataagatctcgtccttgctgatttttccatttcagcagatcgtccgattttactgccatccctttatatttcttcagaatggtatcgcggttaggcgtacctgaggtggataacccgtccgcataaacgatgtcaccactacccggttggtagcatatctcgtcatggggcagcaatgccgccattcccagctgggtatagctgggtaacacgcccaactgggaacgcagttcggcagtaaagcgtttctcggtattgatctggttgcccagctcttctgccacttcataacgcagcgcgtcggagataatcacgaatacgcgcttgatttgtggattgttaaactgcggcttaaccacctcattgtagaagttctgctgccgtggtacgcccgcaatacgccactcctgcatacggttttcggtttccagaaccttattccagctccggcttaattctgccaggtaccagttggaatacagcgcttcgatatagtcatccaggcttttcaggatcattgcgcctttgctgtgaaccaacagcgcgtattcgttaaacaggcggtaggcctggtcaaagcggaacagctcctcgcagtacgctttccagaacgttgcgctgtcctgatagtggaaaccatcaatatgacgattacgcagattcagcaaccgttcggcctgacgcagtgcatcgtaaatagcgcagtattcctgacgcgtctggcaccagtatttgctctgacgttcagacagaagcttcttaaaggcttcacggtctagcgtggtgctctcttccagaagctgcgtcaccagcgcatgaatgatggtctgttcaatgctcagcgtggtttcgcactcgtgcagatcatacggcgagctgagacggtactggtcttctggtcgcagcgcatcctgcatctgctgtgcgcaataatcataggcttctttgtagcgacggtcggcgcgccaggtgaccataaaggccagcgcggaggctctgcctgacggcgtggccagcacgtttttttccagccattcgcgtttctgcggatcagcctgcgcggaaagatcggtacagaacagcttgaggatcaggttttccagggtcggatgctcggcctgatagcccatttcctgattcagaatgtcccacagaacgccttccaggtcgtggcgtttcagcatcgccagcgtgttttccaggtcgctgtcgtcatctttctgctgattaacgtattgggtaatcaggctgaacagaatctcttccgtttttgctgtttttacgccagcgatgaccgcaaccatcttcttatcaagagaagcttcgttttcttgctcagtgaccaggcctttcaaggcagaaagacgtttagtgctgaaaaatgccttccggcgttgaatgtgctcgcgtaggccaagctgtggaatacctaatgtattcagcgtaatggcggcgaaatcggcgtggaactccgtactataaagacgaatatccaatagccagtcgaactcttttgggggggcatcgtgggggaaccacagcaaaaactgctgttccggctcgtcgatttcaatgcgctttttaaccgccagctgcgactggtcggtcatatcaagcagcgtgacgttttcgagttcgaggttatccagctcttcgaggaaacgcttatcgggatcgtgccagaaaacgatgcgatgttcggcgaattttgctttaaggccggcaataaattcctgattttgcaaggtcacaatcccatttcattccagataaaagttaaatcgtcaggtacgggtaacgtgcggaacagatctttttgacgttgttcacgagcccgctgacccaaaagctgggttagcaaggggtcaattgcctgttcgaaaaacattttaccatgaaagcactgtgttaattgcgtcgttggggagcgtgcggcgatgttagttttttgcgtttgtatctgggctaacaagacatcgggatccagatgctggctccactgccgtaagcattgttcaacttcagcatcattctgtgctgtattaagatcatgaaacgcagtattaaaaccggcagcgcgcagccgttcccaaagaggatggataacattccaaagtgcggcatggttccgccattgaggtaaaacatcatgaacggcctggataaatgcctgtatgccgccattgatcgcctgctgatgttttggctgaaacaccagccaaagttcttccggcgcgatcagataactttcaatacaaaaacgcggaagaaccagtagattagctagatttcgacgcttttcagcgatctgcacgtcagtccatgcgtcacgatcaaccacgcccagccagttggcttcaagggctaacgcctcaagcacatttttcttagaacctgctggtgcaaggatccaatcttgttcccatgccggaaattttctgctgaggaaattctggaaagccgtgacatcatctgtaccttcaaccagcagtacccgtctgccggttgtggccactttttgttctttaatgtcccgaataatttgcttaacgctggccattttccgcatccttgccatcggttaaatcaatccgcaatcccatgttgtcataacgttgccagatatccgttgcgtgtgaagtcatcacaagctgaccatttttcctggcaacgatgttctcaatggatgccagcaacggcgatatcagggacggatgcagatgcagatccggctcatcaatgagtacaacaccgccgggctgtagccagcgttgtaccgtaaacagcataatcagcacctgatgttcgccggagctaagcgcatctaacgaatgatcattccctgaatccagtaggacacgttgccgctgtcctggatgaatttcagcttcgatacgtttaccgctgaagaactggtttagcgtggcgatcatttcaggatattcaccgggcatggttgccttcatattgaagagcgacgattcaagctgacctttccagttatcgttcacttcataggttgccagccaggcttgagttgaatcatccggggacaggctgccgatatctttttgcgggcgaacccagcggcgcgcttcggcatccaggtaaaccagattaggcatatcaacacttggtcccttcagtacaagccgttgatactggctactccagtgactccaccagttcttatagggaagaaaaaagtgttccgatgacgtaaaaacggtcgtctctggcgttgttccctttgttctgcttaccgtttccccgagccagtagacctgtgggtatttctcttttagttgtactaaaaatgcctctgagccaagaaatagccctatttggtcctccgattttggcgaaaaggaatcgagaatcatcgcgcagctggcatcccagcgatagaaccaggtataagattcatctttgatattcaggcgcgtacccgtgcccagccaatgcccaaaggcgcgccataataaggaaatggctcgtaacagcgtcgatttaccgcagccgtttggcccggtaatcaggacattggattctatctcgcctgaccagtcgttttcaaaacgaatttcaccgtcgggcagcggtccgacggattgcgtataaatcgccgctattttcattaaataatctccggtgcattgccggtaatggctttcacatccgccagcagatcgccaaacttaccgtagttaaccttaacgccgtcgtcgagatcaatactgattctcatatcagcatagtggcgcaggcgatcgtcgaagctgcgcagttcgttgaattttttgctcaggctatcacgctcacgtttcagacgggtggcttcgccgcctgaggctccatcgacctgttcgttcaggcgatcgatattggcctgatagcgcgccagcagcggcactacatattcggtacgcattctcgccagcgtcgcatcgttgtagcgatgcagatagaccaggcactcaaacgctttctctttaccggagctgaacagccagtatatcggacgctttttatacatcttcatatgatctttccagaactgagtggaaagatagcggcggatggtatccagcgcagattcgcctttttttggttttatcgcgtataaacagaggctttcggcgataaattcgagattttcctgcaagtgttcttcgccccaaacggtgcgaacaaactctttgacgcgagaggtaacgtcatcgtcaaaccactcgtcatccatcagcggcaggataccgtcattgtcagccgggaaggttttgtacgcgtcttcagcgaccagttcggcaaagcctttattgccttcatgggcatagaccagtccttcgcgatcgagggagtagcggcccatcatgcagccgatgatgtagcttaagatatctatagtgatatcagtgtaatacttattggttagatcggtatgatcttgaatatttttatatcgatagtttggattacatagtagagttatttcactttgcaatacagctttaattatagttttgtcaagttgtaatttatctataaaaatattatttatagtattttctattaggagaagtgtttcgactaacttgatatttgtattgattttttgtttgtagatattccgtagcaattgagttgaattgtgttcaagcaatggtgaacaaacataatcccatgattgctcttgagagtcccagtcatttttagctatttcaatagcattggtgactaattcgataatttcatcttcaatttctggatatggtactgaggctaattcaccactagtaaagctaagtgtgggggctagtattgataaataatggtttacaaccggagtgcacattaatcccgcagcgtaaagcaactcatttttgttatttgaaaagccgcaacggcctgtatcatcaaaaacaaacccttttggacgatatctcacgcaaaaattaccttggcttatttttgaccatgttatgccttctctaaagtaatactcatcatttcttacggcagagcgagttttgccattctcaaatttaaaatttcgtatttcgtaaccattattttcccaatttacaactatttcgttattaccataccactttcgatattcacctccactactacaaggaaaccatttgatattatgaatgtcgatttttgtatttgattctttatttgtgataagggttttttttattgaaacctcgtaccaatatctttgaaatttaatattgtcaccggtggacatgcctgcttttaatgctattttttctccaagttttttatggtggcgaaaagataatagactcggtaagtctatccaatatgctattggcattcctggtatgtttttaaaatcatgctgtgtaaatttatcaaatatatttttccttagaagtagatcgcttttctttacttcttccctaccatctataagtctaaaaaatacaggttggtaacgttcggagtgttggtttttaatcacccaggcagttgtctgtacaacctctccagaaatttgcccaaaagcccgagctcccaaatgtgccatcgtaataaatgttttattgtccaataaccagttacgtagtgcttcataacttgacaaaaacatccatgattgcatattgacttgagcattaaacccattttctttaagcaaagaaaatgcattctgcataaacattgcaaacaaatcagctttactatccgggaagttatttttggcaaactctttcagctcactattcattcccttgccacccatatacggcggattcgccactaccgcatcataccgctgcgccaggatccacgcctgctgaatatacggaataaacgctttcgccgctgccttctgctggaaatcgccttcctgctccatgcgatatagcgcttcgagaaacgccttcagttccgcctcttcttcctgtggcacctggatcagcgagcccagcgttttggcgttcacaaagcgcttcagcgtgcgcatcagcagctgatattctgcgctgtcggtatgggctaatgctgtattttcggcaaacatatcccccatgctaccagtctggttctgctggtggaagttcagctgctgccacagcttagcaatatccagatgcaggctctcctgcagggagacaatattcagacgcacgtcgcgggtgaatatccggcggtcatcctgacgggccatcattaataaggcaaagccggaaagctgggcagcacggtcgtcaatgtcgagaccaaaaatattattttccagaattagctgtggaatatcgcgggcgcgatagccgcgctcttcatagatatttttcagcacattatagacttcaatcagaatatgcccggagccgcaggccgggtcgagtactttgatgctttccggttcaatactggcaggtgtaatggcggccagctgcgcctgcacttctggcgtctgttcggctggctcaatgtagtagtccattttgcctttcagcggcgaatccgggtaggtctgcaaccactggcggccgacggagttctgtaccagatactgcacaatccagtttggggtaaacagctgggtggcggcaggaatatcttcgctcttcaccaccttaccgataaccgcatcttttttctcagagatatagaactgatacagccagccgataacctcaacttcttgccagtcttcttccggaataccgtccaccagaccgcgtagaatggagtcggtgcgggtcaggttatccggcagcagtagttcagcttcatcgtccacagcttcaaacaggaacggcatcgcgcggtgcagggcgtggcactgggccagcagcagttcacggtagatggcttcgtcctggttgccggaaagcttcatctcgaccagctgcgcctttttctctggtagtaatgcttccgcgacttccggtacgtggtccagcacttcaaagcctgtcgggttatccgggtgcgagagcatgtggaagccgtggtcaagataaccgtggatttccatataacgaatggcgcacaggcggttgaaccaggtgtaggcacagtgctcaaccagcacgtcaaagccctgctcgcgggcgcgttttaccagacgatcgcggcgggtgagggtggatttggggtagtcgaactgaccatagcgcatggtttcgccgacgagctcggcatccgcaatttgcagattgccttttttatcagcggaaatccccagcgtggttagcttttggatcaccgcatcgcggaactggttacgggcctgtggagcgtattttttgatgttattggtattcatagaaaatcctgcaaagggcagcagagcgctgccctgaaatgggggttactgaagacgaatccggtcacctgcctcaatagctgccagcagcgaagtacgaagcgtatccagcgctttttccacctgttcggcggtttccagcacttcgccaccggtggctttgcgcatctcgctggcgacattcaccagatgcgtttttttcggtaccggttggataacgggtttctctaccacaacataagtctgttgtgactcggccgcgcgtttagcttcattcgctgctcgtaactgggcttcctgctttttacgcagctcgtcgatccactggttaatcttcttctcggcatccgtttgcagtgccattgtttcttgctgttccgccagaatttccggaattgactggctgacctcggcacgttttctggctttttgcatcggcagcagaacgctgttttgcagctctgacgtggcatgcgcttcctgcaagcgttgacggctttcctcaatgcgggcgtcaatgcgttcaagggcgtgctggcggtgctgttccactaactgatgattgacgttctggacctgttcaatcagtggtgtgatgcgattgagatgcttataaggttccggcatctgccagatgttttccagctcgcccagtgcttttaccgccacggcgtctttttccagcgcgctgcggttggatttaaagctgccgttcagcgccgcgcctagtttttgccaggtagcaaactgcttgcggtagaaatcgaccaaattttcacgatcttcactgaaatccagaagctcattgacctggctggtgaccttctcaatcagggcaaaatcttctttttcactcagaatggaattcagcaggcgcaggcctgactcaatctcatctttacctggattgtttccaccttccgctttcgctttgaagacattcagctcttgcttccagtcattgaagacctggcggatatgttcaaccagggccggttcttcacgttcgctaaacggctgttgggcaatttccgccatagtttgtgcggccttacgaatttgcgattcgtcgtgacggcgaattttgtgcagacgcagctcgctgtggcgacggctgttattaaacagctcccacacctgcttacgctcgatattgttattctgctggctgaagctgaatttgcctttgcgcgccagacgggcaaccagcagcttcacttcttcttccggccatccataaggacggcgggcaaagtggttcagaatatcgcgtaaataaaccggcttattgaactcgatattcatgctgacccaggtttctacttcgcgcatcgcgtcggggttggattcctccagttcgcccagatccagctccgcatcattctccaccgtgagtagtgcatggatttcacgtgcgatatcaccgttgaacgggcgcagcattttcagcttggcaaacgtgttttcaatcacatagcggcaagcttcatccacgatgctggatggcgtcgaagatttcttcggtaagcgctcgccaatcgcccagacgtcagcttcggcaataagcgactccagctgaacgcggagcattttctcgcgaacgctgttctcacgggctttttctgaaagcagactggcttgttccggtcgctgacctgcgttgtccctgaggaatttttccgtttggacgaccaaatcaatatcggtccaggtccgggcatcggcaggtaaacgaattaaaatgcagccgtctccctcagaggtgtatgggcggcatgccgcgtcgttgtcatagaaatcataggtcggatcttttggcgtgaggatctttaccaccagatcgttaagcattgcgccgtctaacgggtgcccgttcaggaagcggctgatatcaaagtcctgcttatttgccggatagcgatacttccggtttttcagaatgtcatcaaagatgatcgaggccagtttcttgttgatcgcggagaagtcgacttcgacgttacggatctcgttctcgatctctttttcttcgttggtcagaaacacgtatttgtcttcaacacgtgcaatcaacatttctcgttccagcttattcaggcttttttcaacgcgacggcgtagttcgactttatcggtatcgattttgtctatcgaaagggtaaccaggttatctaatgtacttttcagcacatcgacgtagcggatcaggaacagtgttttcagtaagttgccatcgaactcatcaagaatgccattctggcaggcctgagtgatggtgcggctgacggccggctccaggaagctttcaatcgcggcataaaaacgccagaagggaaccagagaatccagaccctgcggggagatctgctgtgccgcagtctggaaggcttctaactgtgagcgttcacccatggctaactgtttaccggcggcacctttggtccggatagactcaaaaaccttctgcagaatctggtagtgccacgggacaaacgggtagttatcaataaattcttcttcgctggtgtaggggcgcaaagaagcggtggttgtgggatcaaaagcaagctggttacgtagaatgtcgcctttttcctgccagactttcgccagcgcgggttttgcggcatcggttttcaccagcaaacgtttttggataacttcggaggtgttggagcttgaaagctgcaaacgggtagagaaacggccttgaattttagagaaatcttgtccgtcacggctgctcatcccaccaatggccgcattaatatccgcctgggaagtaacaataacccatgcgcgtccaccacagataacacccagattttcagtgatagtctgcagcttcaacatcatctgcgtatttttaccgatgaactggccgacttcatccaccatgaagaggatatttttgccgttttcatccagccactctttgacccactggcaaaaattattgatatctaatgggaaattcttatccagctgttccacccattgacgcgaagcgtcaacgctttgaccggtggcctggcttagggcttctgccatttcatcgctgatgaaatagtaggaatcgcgctctttttcccagcttgagtcagtgatagtggcgaatgcggtcttaaacgcgtcgtattggccgcgtttagccagctcacgctccagatgggcgatgtgcggaaaatcagcacagtagccaacccgttcgttaaataccttcaggaagactttaaggatggcgtcttctttgtcatcgacgttagcacgagaatcaatattgaacagaatcacttccgtcggatgatggaccgctttgttgatatcagcgaggaacagagcatctttgattttgtcttcaaagaaggagtaagcatgacgttctgtaccgttatggctgactttgcggttagacaacagatacgacagaatcttgataaagtgtgatttacctgagccaaagaaccctgacacccatacgccaattttgttttccatgcgtatgcgatccggaccggttgccggaacataagattcaaagaagtggcgaagatgcccttccagttcccgggtgatgacgtattcatcaagctcaatccaggcactggcatcgtccgtctgttcggctttcacaacgccattaatatttcggtccagacgtttctcaaagatctgttcaatattcattgctgtgctctttaacgaggattcaatgtcgccgcaggcccgctttcgggtaccagcctgaaggcgcgataataatttcgggaatcaatgcccgccaatggggagagatcgtgtccgctataggttcccggataaaacatcagcaggggggtaaaacccatcacgtcctgcaaggcgctcatcagctcatggccacgaaccagcggccaggcgttacccattcctgtcagaatgacaaactcttgattctgaagatcgactttttttgctatgtaatccgcgatctttttctgattcaataagccaacgagttgttttttcagcgcttcggtaccgactttcacttcctgctgacagacgcggtcaaataacccacgttcagtgagcatgtcgacgatgatctgaaagatgttgaggtgcgcgaacttgtggtccttttccagattacgcaacagatacttcaggtgttcacgcacctgcagctcattctgagcaggataatcaaaaatccagaacccaatctcattaccggagccgttgtttttgagaaagcgctcttcgctaatgcggctctgaacctgtgacaggcggtattcaagcacgggatcgatcaccgttgtccctccagaatagaaactaattcttgttgtccaaggcgctgcaaggtcgcctgagtttctggtaaaagaaagaccgactggagattacgccgacgaggtgtatccagataaccagcttcagccagtgctttgatcaagttgttacccatttttttgatggatgaatctgagtaactggtgagtacgggctgctgacgaagatggttagccacaaactcatcccagctatccatagggagcttttctttaaattgtctgcacaggtcgttcaccacttcagccaggaagtctttaacaaccggtgaatggaggatcagagcgacgaacagcaattgctgacgctcgcgctcgctcccttcagcaataagcgaccacgccactttatcaagcgtattcaggcgtagttttatcgttgtagcatagcgcttcgccgtattggcagaggaagcctggagaatgttatgacccacgatctgctcttgccaggtttgttcattgggagcggtaagcatgagctcagcgatgattcgactttccctgctcatcagcggcccgcctagcaggtctccaatccatgccttgtcgtttttcatcgtcatatctaccctctgaagactgctatgcagctcgcaaaaaaacaaacgatgattgtaatgggggaaggggcgggatgccatgagaaaaggcaatttgtgagatgaaagccattacggagaccggtatttatccatccctttgaaaaaatgatttttacagtttgttcattgagttactgatttgacagattattcggaacggtaagtcatataaatcttttgtacttcggggtcatccaggctttcataagagatgttctttttatctaaaccatccagccccttgatcccgccaataatagccagccaggcactccggtctgtgatgctcacaacgaatggttccaggtaacgatcaaggtgctttttggatggttctccgatttcgtcgctgagtgccttcaaatagtaggtaatcggccacggttctcgcactatggtctgtagcgcgctggtggagtcacacctgtagtcaagtgacgcgtagagcgccagatgaaccattacgagcgcaagcagaatttataagggcggtgccttaaagagcacagggagattgtaagtagcccgatattgctggcttttgcttagcttgctgacgggattcgtcgtatgaaacatgaaaattacctcatgttttatataaggattcgacactatatcaaaaccggtaactctcaatctttcaaagctatgtgtcagatcaggtcgtgataagacacataaatttaaagatctatatatctggccagatagacttttttataacagctttataaattaaacaaatctgccatagagacagatttgtttaatttataattagaggtttgcaacgttatgatatactttttgcacatcatcatcatcttcaagggcatcaacaagtccttcaaagatttctaaatcttctggtgaaagttcaacttctgattgagcaatcatttctaattctgttgttgaaaattcagaaattccagctgcttttagcgctgcgattcctttatgcaggtctgtagcttcagtataaataacgatgtttccttcttcttcggttacatcacgaacatcaacttcagcatcaagcaaaatttcaaaaatatggtcagggtctgttcctttaaatacaatcactccagtattgtcaaacatatagctgacagcacctgccgctccgatattcccgccttttttattaaaaattgtgcggatattagcaatcgtacggttaacattagacgtcaacgtttcagcgataaccattgaaccattgggtccaaagccttcataacgcccttgcacgaacgtttcatctccgccacctttggctttatcaatagctttatcaataacatgttttggaacctgtgcttgtttcgcacgttcaataacgaattttaaagctgagtttgattccgggtctggttcaccttgtttagcagcagcatagatttctacaccaaattttgcatatactttagacgttgcaccgtctttagctgttttcttagcaacaatatttgcccatttacgtcccactggaaacatctcctcaaaaaattatttacattaatggcaggttaataacctgcatgtttttctgccgtattatatcataatatataaattctcgtctatgagaaataaaaacatccagcttttacggggggttactttgattttaacaatggctaatatggtgggtaagccattttttaattttcttctggttctttttttatttttaataattgaattgcagcaataacgtcttattgatggtggtgtcgctcatcaggtgaggtggaacgcttgcacgtcttgcgacatattgtggcagaaacttaatggcgaaattaagagcctatcccattagggctattttacttgccattttggacctgggcagtgctcaaaatcctcacgtactacgtgtacgctccggtttttgtgcgctgtccgtgtccaaactggctgcgccaataacgcctggtgggatagtctctaaggcgatatattcccgccttgagccgtgttaatttgttggatacttttaaatggaggtatacctcttgtaggctatacctcctgcttcacgttatcgcgcgattaacgcaaatacgccccagccaaagtattctcgcgtccaggtgacgtgacgtttgggggctaccgtcagttctgttcgaacctcttgcgcaaactcatcgtcagggttttcctccagccagcggcgcatggtcatccacttcgcggcttcatatctgtcccagccttgcgggtccgccagcaccatttccactacgtcatagccgagttggtcaaaaaaggcgaccagctcgggcaggggacggaaatcggcgacggatgagacgccacaggcgtgggcgatctcttccgttgcggggatccgacgccagtacggttcaccgatgagaatgatcccgccaggtttgaggcttttggccagcagatctattgtccccgcgacaccgcccgcaatccaggtagcgcctacgcaggccgccacgtcatatttttcctcatcaatataaccggccgcgtcgttatgaataaaatgtacatattcactgacgccgagctcttctgcacgttgttttgcctgtgtggtgaagagcgggcttatgtcaatgccagtacctgtaacaccgtaatcgcgagcccaggtgcagagcatctcacccgaaccgctaccgagatcgagaatccgcatgcctggtttcatgcgtaacgcatggcccagcgtggcgtacttttccgctgtaaacggattatggatacggtgttcgctttcgctaatggtaaaaatacgtgggatatccattgggttattccttttactgagggcaataccctcagaagtggatactttttcaaccagcagcgcaaacagcttgcctgcaaaagtctcgccgaccggccaggtgtgactgtccgggcgctgcaacacagtgaagccagcatcaccaagcaggctgatatattcatcatcgcgccaggccttcatttgactgccgaaacgggtggtacagccgttttccgctatcgcccagaactgcgttgagctggtttgggcctcttcatcccaggcattttccgttaacagcagatgaggctcggcaagaaacaggccgtgcggacaacgctgccagcctggctgcgccatgccctggcgtttaacttcatcgaaggtatgcacttcaacaagcagtttgccatcgggtttcaaccactgagcgcaatgactgatgaggctttgcgcatcagcagcgctaaagacattcagttccccaaacgtcatcataatgaaatcaaaaggttccgtggggtggtatgtacgaatatcctgctgaatgtagtcaatattcaggtttgcggcttgcgcctgctggcgagcccatgtgatggatgccggagagaaatctacgcctgtgcagtgaaacccacgctccgctaacaggcgggtataaaaaccggggccacagccgagatccagaatgcgggcgccagcgggtaactgacgggtaatccatgttacctgttgctcaatcacggttagccggcggctggcccagtcgtggtcctgcgacagatgattttccagcatgcgttggctgaaggctggctcgtcccaggggattttgccttcatcgggtaatagccgaatgcgatgcgttgcaaaaataacggcgctgatatccatcatcatctccttagcgattgtcaggctgggcgcgaacgttgttcagcccggttgtattaatgcggtagggctgaccgttaacggatttgatcagctttttggttttgagttttttgaatacagcgagcgtgcaatcggcgagcaacagcccttcgcggctatagcactcaacggcggtgacgcggcctgacgcatcgcggatgtgcgtaatgcgtccgcctttggcgagaacgtgtaaggtacgttgttcctgacgggataaattcatactgaagaacctgtttaatcatcataggctaaacgtgcaaacacactgcggtgtccgcattcgatttcggcgcattgataatcagtccggcctgaaaaggtcgggtaactgattatcagatgatgacattctccagcatcaaagcctcgggttgagttgaaaggtatttacgtcgtgaatgataacacctgatttctgtaagtgaataaccgggagtgaaaagtgtgatctcaaagggaggctcatgacgtttagcgtatcagatgaatagctcccgcaattaccataatgaatattgattaaactcatatacccgataatgaccgctttgatagtctcggcgtatctttttagccattgacagggttgttgcgttggaaatctttttttaaccaactgaaaaatatcacttaaatatttttcatacataaacatttatggtccgctgagttcggatccggttttgtatgggttaaaaaaggtacgttatgaaagtcatatggactgtcactcctgtggggtatcagcgcatagcgaaacgttgcccttcatgcagcgtaaaacgggacttcacgccttctggggcatttcgggttaattcgcaaaagaaggtactcgatgtctggagtatctataaatgcacacactgcgattacacctggaatatctccctgttctcacgcctaccagtcagcaaaattaaccgcgatctttattgccggctgatggcgaatgatgctgccacggtgcaatattttgcttatgacaacgcgatcctgaagcgaaacaatgctgaattatcggggcagcctgattttcacattcaggaacggtggctggtcagtatcgcctcccacaagcaggtcagtgttagcgtcaggatttcccgttcttttcaggtcagcctgctgtcgattttgaagaagcaactcctgctaagcgcagccgaaatcaagagacggattgaaacagggcaaataagtggcgtcacgatgaaaatgcttaaatcgcgaaaactgaagaatgcgaaatatgatttgcagctctcagttgaaacactgtatgaccggcgaaggattgttctgacctgtcgataaaaataataagctcaccttacgtttaagtgtgctggtatggcaacgacgcaacggaatgaaagaaggattaagggacaggtgagctttagttgaataacgcttgtctgtggcattcagtgaaggctgaatgccatggataatccagattttcgcaccagtgatgatattgtatggattctttgcgcaagccagcagaatgacaaagggcgatgggttacaattatctgtagagtaaacaaaaggaatataatgtggcgctatacaatatctctgagaaaatactgactacccttgaaaaaacatctttcaccatcgaaaggctgcaggaacgctatgatcttcaggaggctatcaagaagaatattgatattgtcgcgccgggctgccttgtcatatccgaagaattctctgattgggaggatagtcggcggaggattgatttattagcgattgacaagcaggccaatttggttgtcattgaactgaaacgtgatgaaatcggcgcgcatatggaactgcaggcgctaaggtatgcggcaatgatttcaacgatgagttttgcgaaagcatgcgaatattatcaggcatatctttggaagcatgggatcgatgagaatgcaaaagagaagttactggattttgtggagttagaagaaaacgaactcgctgattttggtaaagatattcgcatcgttctggcatcagcggatttcagtaaagaattaacgacaaccgcaatatggctaagagataaaggtgtcgatattcgctgtgttcgcttaacgccttacaactttaagggtgaagtgctgattaatgctgaacaaataataccagtccctgaactggaagaatatcaggtcagattcagagagaaacgcacggaacaaattattagcagtcaaaagtcggagagggattattccttatataaatataaaggaaaaaccttcaataaacggaagcttgcacttgaacttttcactgactggattaataaacataatcctgcgaatatagatgatctcaagaataaattgagtgaagacttacagaaaagaacagtagcactggttgagcagatccctgaaaaaaggaaaaacagatatcatatgcaggaagatgcgttgattgagttgccgtccggtgagcgtattgctatatcgaatcaatgggggttagggactatagaactgcttattgattttgttcgtcaggataattttgtagttgaaaaagtaggttgacaggaagtaataataaaatagatcccattcattaatgggatctcacgtttcatccgatacgaagaccatggtctctttgtcagtagcgtcataattacgcaagcctctttactttgcttatcatttatatttaatgtaaatattcacgcaacaccattaaaaaataagaaaaaatggctcactgttgaactgatattaatacctgaaccactgaattagagtaatgtggcgctattcatagcgtaattttttctgttgcggttacagggggaggaatgcacacctttagaccatactcactaaggcatagcgatctgttatatgaagatattccgttagaaatacgcgagcaaataatcttattgattatcaatacgctaggaaactgctcctctttttatgatatgacattatactgctatcataatagtcattctgacgaagtttatcgaagaatatgtaaaacgttgcgcaaagagtatggcttattcaccttatatgcgcattcaacgtcatatctggatgaaatgagtaatctgttattaaaaacagatgataaaagaaagcatattgataccattgagcttgcttttaactatatagatacctaccttcggacctatgaagttacgcttgggttagaaccggataaggcgattagtgaattaaataatatatttcatgagcatagtttaaaatatcgatatgaaaatggtaggattgtaaggttgcgcagaataaaacggcttaaaaacatatgttattatttgtactcccctggagagtatggctttgtcgaatatgatcttatggaagcgtataatcgcctgatgcttaatgattttgcctgtgtcgtaaaggaatgtcatgcagtcttcagaagcgttcttctcagaattcatgagagaaaaggtatcgtatatcatgaacaagatagtttaaataccttaatgactaatctgatggcgagaggcgttatatctgctgaatatgcacataaatttcattttttaagtaacgtgctggagtcagaaatatttctgccgatggcgccagaaaaatcgcatcatcactacgcaatgatgctccgtatctctgaagagttggcctgtagtatctattatcttactgagcggagtatattttttcttacccagcgggctgaagaagacagtgtcgcgccataataatgatcgcgctgtcgctcagtcagactggatcatcgttatttaaatttgttcagacgtcggaattttttgttctgccgtctgtttttttagtgatgagctgttcagtgcaataataaggggtacagtacgatgactgatttttaaactgcatatcatctgtgtcgcatttactcatgggtattgggtcagggagagagaagaatgagcactattttaaagccttttttattggcggtaaccctgatgttaatcttaataaggcctggctttgcaacggaggatggagcgataaccatggttaaaacctacagcgcttatgactatttgcagacccgagcgcggttgatgcacgctgtcgccgatcacggtctggtgttatttggggaatttgaccatgccagagcggcacagaatgttaacctgaaaatgccgccgacaacggttctggtctttggcaatcctaaaggcggaacgcctctcatgctggcgcatcccgaactggcgctggatttaccgtttcgggtgctcattagccagcaagccgatgggcgaacgttagtcagttatcatcccgctgaaacgctgcaacgttatggtcttgatgccgcagacatacaggctttgaaaaaactggaacagctcgttgaaaaaagtctccactaaagctgaaaatcgggcgatgtgtttgcacaagtgatgtcgcgaataaatgcggtcacatcgtccattacctgatgcgataaggcggcatcgaaggtggcgctatcagcatcacagaacccgtgccgcgcatcgtacattttacactgcacccgggggcgcttttccagcgcctgccgcatggcgaggggatcaaacgctggctcataacgcgcgacaataaccagtgtcggacagagaggcgcaagatgaaggtactggcgtatacgggaaccgtaatagcaaacgacgccatcgcataacccactggctgcacttagccatgcgagcgttgcgccgacgctatatcctacgacgattagcgtctcgtactgcgttctgagatcgtggagtaatgtggtaacgacggcgggatcaaagccgacatttgctgaaaagtgacggtaagcctcctcctgctgttcatagcgaaagggggtatggtgaggaaacagcgcgggaatatagatgtcgaatccgcgcgtcatccattcatggcctgcgcgttggatatgagcgttaataccataaatttcatgcagaataatcgctgcccggcgatggcggctcgacaaactggaggcgttgcttcccccggatacgcctggggcgaaaaacacggtgtcttttatcataacgcgttcttgatacaaagagagcggctggattttcgccgatcacgctatgtcagaggcattattcctgtcaatgtacagacacattttatggcctgatttttggttgataaattttatattggtaaaccaatatgctgttcatattcaggcatcagggctaaaggtggaacatcagtcgtgtattgtctattgcctttcctttcatctggcctcactagcgaaacggcgcgcattattattttgttggttgaccagtttcgcgtttttggtgtgctacgcgtgctatccctctttacaaatgctatagtctgataccgggaaatcgcatcggacgggcacgaccaatatgaaatcaaacacttctcagcaaagaccttaccaggaagtgggcgcaatgatacgggatctgattgttcagacgccgtaccgccccggggagcgcttgccgccggaaagagagatcgctgagaggctcaatgtgacgcgtaccgtcgtgcgtgaagcgctgatcatgctggaaattaaaggtctggttgaagtccgccgcggcgccgggatctacgtgctcgacagcgcggataataacgagatggaaggcgctgacgtcaatcactgtaatgacgccgggccttttgaactgttgcaggcgcgtcagttgctggaaagcaatatcgctgaatttgccgctctgcaggccacccgcgaagacatcattaaaatgcgccaggcgttacaactggaagagcgagagctcgcctccagcgcgccgggcggctcagaaagcggcgatatgcagtttcatctggccattgccgaagcgacccataacagtatgttggtagagctcttccgtcagtcctggcaatggcgtgaaaataatccgatgtggctccagcttcatagccatctgggcgatacgctttaccgtaaggagtggctggtcgatcataagcagatcctcgcggcgttaattaagaaagacgcccgcgcagcgaagctggcgatgtggcagcacctggaaaacgtgaagcagcgtctgctggagttttccaatgttgatgacatctactttgatggctatctgtttgagtcatggccgctggacaacgttgatgcctgattatacctggaatagcgtgggcagacccagtccacgttttacttcctgtagcgtcttttgagtgacctcatgggcccgctcgctaccttttttcagtaattccattagcattcccttatctgcaataaaggttgcccgtcgttcgcgtatgggcgcgatcagttcttgcaggcaggtctccagctcatttttacagacacggtcgcctaatccgccttgttgataatgtgctttcatcgccgcgactttggctttatccggatgaaacgcatccagccacgtaaagacgacgttaccttctatttttcccggatcgctaatttttaaatgattgggatcggtgtacatcgcgctgaccgcacggtggatggtctcttcgctggcggaaagaagcagggtattgccgagcgatttcgacatcttggcgctgccgtcaatgccgggcagacgacccgtatcgctcaggagcgcctgacagggtcgcaataccggcgaggagaaaagactattcatcttatgaacgatctcattcgtttgctcaatcatgggcaattggtcgtcgccaaccggtaccatttcggccttaaaggcggtgatatctgccgcctggctaatgggatacgccatgaacccgaccggcagggaacgggtaaagcctttttgggcaatctcattttttaccgtaggattacgctccactcgggcgacggtaacaatattcatatacagcaccgttaattcggcgagggcgggtaacgcggattgcaggcagatcgtcgtcagcgtgggatcgatgccgacggccagatagtcagctaacacttgcggaatattatcgcggattttttgcggattactgccgttatcggtgagtccctgcaggtcggcaatcaggacatactgttggtgatcctgctgtagcgcgacgcgctggcgcagtgaaccgacataatggccgaggtgcagcgagccggtggggcgatcgccagtcagaatgataggaagggtgttcattaaggactcctttatgcttactgtaaagccgaaagacgtcccgaaacgcagtagccgcctttcggcggctacttaaagagggatagtgatccgtgccgccttcaggaaggcagccaccagcggagatgacgttgcgtagcgttggatcgtttcgtgttcatgtgatctaacgtatcacgactaaacgtaagggtaaagcggctggcgtatcgtccgggcataaagtcatatcgcctgaacagataacatctcactgactttgaaacgcgattttataatttgctgcccaaaaatacgtggcgctgaaaggcgcatttttgatgcaaatcatttattactgtgataacactgcgcgcgataaaaacattaaatatattcacatagtaaatatgttctattggaatggttgttttcgatatgacaaaagtctaaaaaacccattgatgtgaaaaggaataagaattgtctatattccgattcggtggaattaagtaatttctcggataaaaataagaaatgatattgatatttcttttttgatatggttcttatagcggctatggttattcaggaaacgatgcttgaatgcctggcgtaatagatttcaggtcagtagcgctattgtaaaatggattgttgatggcagaaggtatttagcaagaatccagttatagcagattgtcggtatttaatctggtatacagagacaccaacgaaatggctggaaaatggaacgttctttcattgttggcgttccgtccttgtcagcctgctttgccgcatgataatcacggaggggggatggacgccatctatttaaaactggacggtattgaaggcgaaagccggatcaaaggttttgaaaaccaaataaaacttattgcttacaaccacaacccgacaaaacgggagtccggcgaagcgagagggacatatattggagggttgacgctgacaaagccagtcgatcttgctacaccaggcctctatgagcactattgtaacgggaaaacggtgaaagaaggcgtgctgacattatgccgtcgtgataagggcgcaatgctgccatttattatttatacgctcaccaatgtgcgaatttcacgcatgagcaatcatggagacgccgaaggcagcgccacggagaccgtggatttggtttatagccatattcgctgggatattcccgcattagcgtcgaaaagcaaaacacggcggcctcttcaccgacaggcgctgtggcgatgaggacaaaacaagcttgcggactcgcagtgggcgatgctgtatagcgaaatggcatttagcggcttgcgaaggctgatgagcgctcatgtaaccaatcgattgcctgaaaaggcgataacgcgtggcccttacacccgttatgatttttacgcatagccgctaataaaacggcattttttatatacacatcaagttgatagtgtgtttctgaccttgacgtaaataagcgggaaaagcgatgaaacacaccattgggatactgggggggatgggacctgcggcaacggcggatatgttggaaaaatttgttgaattgcgacatgccagttgtgatcaacaacacatcccgctcattgtcagctctatccctgatattcccgatcgtacagcatgtctgttatccggcgggccttcgccataccgttatctggagcgttatctgcatatgctggaagacgccggggcggagtgtatcgttatcccatgcaacactgcgcattattggtttgatgatttacagaacgtcgcgaaagcgcgaatgatcagcatcctggacgctaccctgggggatattccgccatcggcgcggcacgttgggctgctggcgaccaatgcgacgctggcgaccgggttatatcaaaagaaagcgctggcgcgggggctgacgttaattcagccagaagacgcggggcaggcgttggtaatgcaggctatttatacgcttaaacgtggcgataaaactgcggcgcaagcgctgctgctgccgcaaatcgatagccttattgcccgtggcgctcaggcaattatcatggggtgtaccgaaattccgcttattgtggccggacatgaacgcgcgatagcgtgcccgatgattgattccacagcgtcgctggtgcgcgcggcgattcgttggtatgagtcctggccagacacccgcgcctctttgaccggggagcaacgccttaccgcctgaggtgtttacagcgcggcctgaagcccacgcaggtcgcgccaaaatgtttcggctacctgactcatgcgggtattcatgcgataagcataagcctggatcgggataaccagttcgtcggcatcaagcactatcaggcgcccgtcggtaatctcctgacggatagcatactcgggcaaccaggcgattccgcagccgtccatcgcaacctgttttaacaattcactcatcgaagagacgaaaaatgtactgaaactcagttcagcatggcgagtcagggtacgatttatcaatcggcccatataggagttctgactgtaattaagcaggggaaagtgcggctgctcaagcgtatagcgcggctcgccccggccattgttggcgcaaaccggaaacagtctcgactcaaacaggcggatattatcaaacggcgcttgttgcaggttttcatcgtgataagaaaagataaaatcgctttgcccctcacgtaacatatccaccgcctggtcgacatctatcgcctcaacggcgtaggtaaactgcgtaggcatctgcttaacgatggtcggcaacaggccgagggagagcgagtgggcggcggcaatcttgattttacgcagcgtataatcgctgccgccgcgcagttcggtcagattactttccagctgctgtaacaggtggcgaacctgggagtgaaagattttaccctgttcggaaagctgtagcggcgagacctgtcggttaaacagttcaacgcccacggcatgttccagggcgcgaatccgccggctaaaagcgggttgcgatacgttgcggataatggcggcctgagagaaattgcggcacttttccagcgtcagaaaatcatatagccattttgtctcaatattgtgcaaacctgctccagttacatccatttaccgttatcctgtcagccgcccgaaggggcattctacgtccattcgggcggctgacaaccgcttatcccatcctctttcagaatgccgtgatggggcagcctgaaactagcgggaattacgccggttcaaaggtaccttttacgcaggctttcccctcattgaccatgcgtttgccgcgcgcatacacctgctcaatgcgtaaatctgcgctaaagacgagcagatccgcatcgttaccgggacggatttcgcctttgccgtccagactgaggaaggcggctacgctggtcgtcagcggacgcagagcattggccaggctgaatccgtagtggttaaccagcgtctgcaacgtctccagcaaactttcgaagcccgcgacgccgatacccgtcagatttccggcagcgtcaaatagcggctggctgccgttaccgtctgaactgagcgtcacccgggaaagcgggacgccggcttttaccgctctggcaatgccctccgccggcgcgacgggatccggaatactggtggtaatgtcgatcacgccgcctttaagcgcaaacgccagcgcctgctcgaaaagagattcgctacggttgacgtgggtaggcagcagtttaccgatcggcacgtcgctgttttccaggatgtcatacagcggctgtaacccttttttgctgctgcccatatgaaaaacgctgacaccaggtttgccccccagcaggccgccaacgcgtgattcggcggccatgctggcgagttgattcccgctgggcgcggcggaacggtggtcggagactgcgcatttcacgccaatgacgcggtcgatcagcgcgacgtctttttctaccgagccagtaatggtcggcgacggaacgtgataagcgcccgtgagcatccaggcggtgatcccctcctcatttagcgctcgcgttttggctaacagcgacgcgggatgacggctgacggagtcggtgccaagcaggccgacgaccgttgttatcccggcttccgtcaggcggctcagagagacttccggcgtccgcgtcgtcggccccgcttcgccgccgccgccgatcagatgaacgtgttggtcgataaagcccgggcacagcatacggccgctaagattaatcaccgtacagtccggtacgatatcgccggggatgccagcgccgacggcaataattttgccattcgcgagtagaacatcgcagatgccccggtcttctggcgcaaacaggtgcgcaccctgtaataaggtaaactccgcggcggataaatcaggcatgataactccttattaaacaataagctgcatgacccagatcgacagcagcgcattgatggcgcagactgcgataatatgcgggtaatatttggcgttgacttcggcagtaccgagacagcggccgacattctgtaccgggtttcccatcaggtaaatggctggcagtagtacggtaacatcgtggccgcttagcgcgccggcggtagccagactggccgccacgccaacggcgccgcccatactcatcagcgaagccagaagcaccgtagccgcttcgccgggaagcccccacaacgccatcacgggctggcagatatggcctacccagtcgagcagaccggtaattttcagcgcctgaataatgacaaatgccatgaccacattgggtaacaggttggtcgtggcgatggtaaaaccgcggcgtgcgccatcgataaacatatccatgacattcttacgtacctgagtcgtcatgattgggctccttgcgcagggtgacggcgttcttcgatgttaatccagatgcgcaaaaggtttgcgccgataaatttgaatagcagaatgaccaccagcggaatgatgactgacgttcccagaaaggcgaataccgcaacgccggaggagaaatagttggtgataatagcgctgccgctggtctgccaggcggcaaaaatcactttatcgcgttcagtgatttcgccttcctgcgccagttctttggtcatacccgccgcggcgtcggtattttgcaggttggcgatcagcgccagtgagcaaatgccaggaatgccaagcaacggtttcaggatgggcgtcatcagttgctgcgccgcccgcagaccgcccagtccatccgtaatcgcgatgatacccagagaaaggataaccgacggtgccagctccagcgcaaaaaggaagccatctttcgcgcccgttccgcccgcgccacgaaaggtctgcgtaccggtcacatgaccgaatgacccgttgagtacggtaaaatcaaaaacgcgccaccagccttcgcttccggaaaatacgccggaaaagaaaataatggtgagaaaaaacgccaggtatccctttatcccgaccttttctgtatcaagcggcatggccgccccgtccacttgttgcgccatagcgatccccgaatttttttgatgatgtgttggttgtagccacaggccaaaaagcccgaaacagaaagaccttatcagccataagggtaaggacaaaatgcaagtatgtatcgtgctatgcgtttcttgcatagcagcgcgaaaaatcaccatcctcgctactgccggaggcgcggggaaccgtggacggtataacgcgaggtaaaaaagcaaagaaacaggtgttgacgcaggccggagctgggagcaggaaaaaaggagaaataaatttgacgttagtcaatttcacgccacttaattatcgttgttaaaaaataggattttttaacctaaattttacttttttactgtaatttttcacgccttaagaggaattgtcacggtcaggtcagtagccgctgataggtcagcttgcgccctaagaatcctacgggcaggtaataaaaaacgaataatcgaattaatttcatgatgtgatttatttataattgtgatgatttgagagggagcgataatcatcataatggaatatatagccaaaataattcgagttgcttaaaggcggcaagggagtgagtccccaggagcatagataacgatgtgactggggtgagcaacggcccgtcagggcgaggcccatggatgggccgggtaatccgtagccaacacataagccacttgaagtaggaagggtatataaaataataggcagattaataacactaaaaaccatagaataagtatagtttttagtggcatctttaccttgaaataacgtgttgaggatgtgctattaaaaacagatcctcattgcgccgcgaatagcattaaagatacaacccggtgcggagagcgtgggtttactctaccgcttattcacgtatcacaaaccgtttttgttttatctgctgcacagcgctgatcagcgcggcaaaaaagagcgccgcggcgccgcaaagcgtggcgttgataattgccgacgcgccattgcctgacagactggcggcgagcggaccgagaatttgcccaataccatacgttagcgtcaccaggcctaacaaattaatattacccggcgcgctgagttgtcgggcaagcggcatcaccagcgaggttgtgcccataaacgtggcgccaaaaccaatactgctcagtattaacagcaacaacgagtcgctggcgagagacagcagcacgcaggcgctctggatcaacaggttcgcggtcaggcatggcaggacgccccaatgttttgccgcccacagccagccgaagcagccgggaatgatcgccaggccgaccaacgaccaaaggtgcgccgtgagtagcggagagcccgcgcttttcgccatcagcggcaaataggtagcgacaatgatgtagccgaatccggcgaaaccgtacaacagcgccagttgccaccagggcataggctgattttcgattcttgctaagggcgcaggcggcagcgcatgagcgcgggggggaatcaatattgccacgattaatagcaatataccggcgagcgccccggtccccagccatagcgaatgggccgaaagcgcataatgtaaaccgccaatgacatattcgttgcccagtgcaatcccggccccgacgccggaaaagagcgcggcgatcacaaacggatggcgggtatgatgcaacacaatcattgatccaaaaatcatcattcccgcgctcgcgacgcctgccaggaagcgcaccaacatgacgaccgcgggttgggtaaatatcgccatggccagaataagaataccggtggcgaccgccgaagccagcagcatggggcgtagacgagaggggagatgaaaaaggccaaaggaaaacagtaagcttcccgccaggtaccctgcataattggcgctggcaatccaggagagttggttaaacgttagctgcttttccgccagcattaccggcagcatgggcgtatacagaaagcggccaactcccatccccagcgtcaataccatcataccgaaaagcgccgtaaaaatgggatggcgaggtgaagcgctctgagcatgaaccatggtttttctctttgctaaagtaaggcaagaatgcctgattgttgttgcaaatgataataaaaagtaaaattaatgtttcaaatttgcaagaaaagaaagtgaagcgcaggcgaataacggattgagaagaggggcatcggtgggaaatggcattaaattaatgcctcccacgtgcggggtttggcagttaatctgaacgagaattgcgccttccccttcttagatactgagcagtgccggtatttgcgacagtaaatataacaccagaccgatagcgccgccgaccagcgtgccgttcacgcggataaactgcaaatctttaccgatattaagctcaatctgctgcgacatatcgcgcgcatcccagccttttacggtatcgctgatgtggcgcgtcaggaaggcggcgaattccggcgcgacgcggtgcgcggcctgttccagatgaccgttaagcgaagcgcgtaatgcgtcgtcggcgatcagcgtctcgccaaaccattgtccggcatgagcgatgcgctgcttcacctttgagtcttcggcgttgatatctgtttttaaccactggcgtagatccgcccagatttcgccgagataacggttaaacgcctcatcttccttcaggtaacttttaatgttttctgcccgggcagccatttccggatcatgtttaagtttatcgatcagcttatacgtcgcgcgatcgaaggcatgacgaatctgatgcgcgcggtcgtgactgatatcatccagcagagaattcaccgcgtcggagaccagttcagcgctgtgttctcccagccattcggtcggcagaatcttcgcttttaacggatgttcggtctccagccagcgtatgatctgtctggcgataaatgttcgggagctgtcacgctgtaacagggcgataagctgggcgatcagcgtatcgagtaacacctggtgacgatcgtttttggtcatgctttccagcatcagggcgctggtgccggaaagatccactttatcaatcgccttatgtaccgctcgcttgagcagccgctgaatacgggcgtcatcggttagttccagaaagccgctcataatttgcagcagatgctgcccgacccggctggcgttgtccggctggctgaaccagtttccgataagcagcgcgggttcatggcggcggattagcgcgatcagcgactgcgtatcaaggaacttctcctgcacaaattgcccaagattttcgccgattcggtctttattacggggaataatcgccgtatgtcgtgaaataaacggaatgggaatgcggcgaaacagcgccaccacggcaaaccagtccgccagcgcgccaaccatcgccgcttcggcaatagcttttgcgcccagcacccaaaaactgggcggcaggaaaagcgtggtcacaaacgtcgcggcggctatcagcaacagtgagagcgccaggcgtttggcgcgtttgagttcggcgattttattcatagggttaaggatagagccagacggcaggaacgtgcaaaaaacatcagattatcctgtgccggataagcctctatccggcagagtgtttacttctcagcggccagttctgccgcctcatgctggcgcacgcgctgtaatagtgtcgccagagtgaagaccacaatcaccccggccaccgctgccagcaggtgaaacggcagtctcccgccgtgaaaccacagccagcggccaacttcgaccgacaccgccatcaccgtcagaatcaccatgttcagcgaggccgaaaccgtcccttttggcaagttgttggaaaaaagcgtgaagcgaaacagcgtcgggaaaatcatgccaatgccgaacgcgtacaggctggtgcccagcacagaccaaagccagacgtgcggcagaagaagattaccgaggagtaatgtcgccagcccgcttaactggattggtacggcgcgccagataaaacgcggtcgggtcggatctttcaccaggcgcacaacgatcatattggccacgatcaccgcgccgaatacgggcacctgcgcccaggcgaattgcgaagtactcatcccgccagcatcgatcaggatcaccggcgacaccgccacccagctcatcatcgggatgtagctcaacgacagcgtcgccgccccggtgagaaaaatcgggttgcgaaacacattacgaaaatcgcgcagtacgctcaccgcgctgaacggcaccgcgccgcgttgcaccgtttccggcatcgccagcagcaggccgcacaacgccaacagtcccatcaccgcaataataccgaacagcaccttccagtgaacgaagtgcatcagcgcggcgccggagagcgggccgataaccggagcgaccagcacaatggaggtaataatcgccatcagcttaatggctttggtttgaccgaaggcctcctgtaccgtgacgtagccgaccgttgcgataaagcaaatgctggtgccctgcacaaaacgggcaaccagaaactgcgtcattgaggtcgtcaacagcgttgccgcgcaggcgagagtaaaaattaatgcccctgcaatcagcactggccggcggccaatcctgtcggatagcggccccagaagccattgcaacgccattccgcccgccagatagagactgaccgaggccggcgcaagactgacgtcagcattaaaatcgcgcacgacgttaatgatgccaggctgaatcagatccgtcgtcagataggcggcaaaatcgtacaaaatcagcgccatcgggaaaaataacgttgtggcgcgttgggagaaaaactgaataatccgttgcataaaaaatgcgctccatgtcggagaaccccatgatgggatagcgaaactcaataccgtcatcgtgacgtcaggcaggcgatagaaacagcggctgcggatgtactgaatttcatgtaatcaaaaacgctgccggtgaaaacacagacaggaagagacgcgttctgaatctcgtcagaacgtgtggcgattacagataacaatcagcacatcacacctcgggaaatttacgttgcacggaaaatatacacattaagtgtaattaaattttgatgttaatcaaaagagtttgtctggttaataaagataaaggcagggtgcgcaggctggtattttgcgtgctcagttccgaaaatgcatgtgcattacagataacaggatttatcttccgtcgcgcctcgcaatgctgaaaaggtacggatgagaaaggaattttcaggaggtagagtcgcagcatcctggtttggggggacggagcgccatgaaaaaatcgacgacctcaacaccgcatgatgcggtgtttaaaacctttttgcgccacccggaaaccgcccgcgattttatggagattcatctgccggtgtcgttacgccagctttgcgacctgctgggactggttgaacgaattgcttcgctgttagttactggttgcgctaatgacaggcagcttaaagcgctgtttaattatcttatgattcagcacggacatacgcctcgtttcaccacgtttattcgtgatgtggtagggcatgtcccgcacactaaggagagactgatgacgctgatagagaggatccgcgcagcggatcgcagaaaaggggaacggcaaggaagacaggttggtctggaggaagggctggaaaaagggctggaaaaaggtcagcgcgttgccgcattgcgtatcgccaaacagatgctggcggacggacttgaccgcgagactgtccagcggttcaccggccttacggctgaagagcttcaggatgttagccactaacgcggttccagtctgaatgttgcaggcccggtgcccgccgggcaacgctctctataattatcgctgataacctcacgaatataccgaactttaccgatagcgccagccatctctactacccttattgttctgagcggcatttacggctgccttaatgacgataacaaggagacatgtgatatggcttaccagacagtgaatcctgccaataatcagctcattaaagagtaccccccgcacacggacgcggatattgaagccgcgctgcaaaaagctgacgcgctctatcactccgattggtccaaaggagagattgaccaacgtctgccggtactgcataagctggctgacttgatcgacagccgtgttgaagaactggcaaaaatcgccagccaggagatgggcaagctcatcgagcagagccgtggcgaagtcaaactgtgtgcgcagatcgctcgctattatgcggataaagcgaagcagtttcttgccccggtgccttataaaaccgagtttggcgacgcgtgggtagaacatcatccgattggcgtcatcatggctgttgagccgtggaacttcccgtactatcagttgatgcgtgtgctggcgccgaacctggccgcaggtaacccggtgctggcgaaacatgccagcatcgtaccgcactgcgccgagacgtttgcccatctggtgcgtgaagccggcgcgccggaaggcgcatggaccaacctgtttatttcctccgatcaggtggcgaacatcatcgccgacccgcgcgtgcagggcgcggcgctcaccggatctgaaaaagcggggagcgccgtggcggcacaggcggcgaagcacattaaaaaatcgacgctggaactgggcgggaacgatgtgttcgtcgtgctggacgatgccgatcttgagaaagcggtgaaaattggcgtgcaggcacggctcactaatgcggggcaggtatgtacggcggcgaagcgctttatcctgcatgagaaaatcgccgatcaattcctcagccagttcaccgaggcgttcaggaaggtgaaggtgggggatcagatggacgcttctaccgaactggggccgctgtcgtcgaaagatgcgctggaaacattgaccagacaggtcgaggaagcggtgaaaaatggcgcgacgctgcacgttggtggcaagccgctggaaagcaaaggcaacttctttgagccgaccattctgacccatattacgcgtgacaacccggcgtactttgaagagttcttcggcccggtggcgcagatgtatgtggtgaaagacgatgacgaggcggtaaaactcgccaacgattcccactacggcctgggcggtgcggtgtttagtcagaatatcgaacgcgctaaacgcatggcctcccggattgaaaccgggatggtttatatcaactggctgaccgacaccgcagcggagctgccgttcggcggcgttaagcgttcgggcttcggacgcgagctatcggatctggggattaaggagtttgtgaaccagaagctggtagtggtgcgccgctaatccctgttgcccctctgaaatcgggaggggcctggctttttgcagcgaaggacgcggatcttaaatcagaacgaaataagcgaacaaaaccccctcaattgccctccttatttatccacgttgcactaaccgtgctttttatcccggtattgtttgtacagacattcatgatgcccgcattttctgttctatgcggaggccggtatggaattttacgagaaccgccccagacaaccattcattggctttgtgcagctcagacgggcgctaaaaaggtggtggctgcgtaagcgggcctgtcaggcgctgcgacgaatgagtgacgagcagttaagggatatcgggttggaaaggaaggatgtggaatagtgaatctattcaagggcaatagtaattaaaggattttatgatatattactatgcccttatgttatgcgtgctcactattttatatcatttatattaatatcattaatctttttctcaatgtatttttctggttttattttggttttttgctcaatcgcatgatatttttccttatcaatggttatagtcattttttcttttttgttaaatatgccagggatgataatcgctgctgcaattatcaataatattattattgctgcatgaattttgtgtttgggaaatgcttttaatagagtacacaggattgttatacccttatgtataagataaggaaaagatagaaataaaacaaatgggcaagcaaaatttatgacatgtttcccatagtaattattatttattgttagcgaaccaatacagaatgccatcacacaaaatagaaatattccgaagcataagaaggatataatgaaagaaccttgcataattcttttatgcaactcttgcaaaatactatttgtgatcttttccagtttagtgttatgacaaataactaccaacatcgcaaaaaaaatctcagataaagcaagcgaaaataacgtattgaaggccatgtagctcatcagcgtttcgaaaaatatactttgctgaagatagtatggtaatagagcgttgacctccataaaaaaagtacatagaaatccaagggcgacataagcaattaaaccttcatttctccaaagcgtaatgttttcttttacttttagccgcatgattttccttcactcattgatatgaattataattaaagctggcaagggttctttgccagcttattttatgcgtttacttagaacctgccatcacgtcgataaacgcctgcacctgcttttgcttacgcgccgatagcttgctcacctggcgcagcgactgcatcaactcgctttcttctggttgcggctgctgtgccgtcagcacaatacagccgttcatcaccctcacatccacctcggtaccggtggcgaaaccggcggcttccagccactggcccttcatggtgagggcgggaatgcgggtataatccggataacgactcgcataactcacggtaaggtgacggttatttgttggggagacttctggatcgcacggatctgcaatagaatggacggtagtcatgatggctattccctaaaatagtgattgtgatgagcgatatggccgtgttcccgcacggccatatcgcgctaaatacctgtacataacatcagtaaataaaagaaaagtccagctgaaaatagactgtaatgggaatgttcaggaataaactggatatatttttgatggttatgattgcggggaaataataaaaagcgcaccgggaaggtgcgcttgaaaataaaggtcaggcttttttacgcgaggtttttttaccgccgctggcggcgcgttcggccttaattttttccagcagggcggcggcgctgttttcaccgctgataagttcagggttttccgcacgccactgggcggtcagctcgccgcggaaggccttcgccaggatcgactgggtgaggctgttgacgcgggtcagggcgttgttgacctgcttttcaatggtgtcggcgtaggcgaagagttgttcgacgcggcggacgatttcgtgttgttcttggagtggtggtagtatcaatgggagtgattttatccttgccaaagccaacttcccttgagctcctgattttatttctgaattgataatatcctgaagataactacttctcagccataaagaaagaaatctattgaaaatattttcgtttaaattacatatcttggcagcattttcagttaaatttgcattattataaacatctggaattataccagcatcaccaatacatgcaccaacaatagttatataaagatctccagatgagactgtatatctagaaatacttttttgtatatattcttctaagtatagttgtccttcaggaagaacagttccattttttagctgccctgctctaatatatggaaaccctgtattctcagctattaatgattcacctttaggtaatctcttgccacctttgacatcagcaaattgaccaatctcactgattttccataaagatggaatagaaatattcaattctgttaacttgaatttattttttttatgaagttcttttgtcagttgcccgtttactgctgcaactatcactgattggcgaaaacgtttcaggatttgtgggatttgctcaagacgtgctttggtgctgtctacctgcgccagcagcgtatcgagtttttcggcgatgactttttgttcggcaagaggtgggacaggaacaccatagttctcaagaaattctttagtaacacgtttatgtccgactgaaccggacatattaagtgctccattagttaaaaaatctttagttttaactaaagcaaacaaccaatggggattaattaacccattaatagaccgaagaacataatattcagtgctaccggcaccatagccgttagggaattctttgattacaacagcttttccattttcgaagcatggcgtgattttggcaaaaataacatcatcgttctgaaattgagtaaatcctttttttacttcactccactttttggtttcaaagttacatttacctaaataggttgttggaacaccggccatcggcataaatccaacatctaaatcatcatcaagtttaagtttgggattgaggttgcacatttcattgattgtgcttgtagcccacccctccggcaatttccccccactcatgccttcacctcgccaaacgcttcattcagcaactgacgctgagcatccgcttcatcgcccgcgcccagctcgcgcatcagcgcatccagttcgcccagcgcctgtaccagctcgcccatcgcttctgccgccagcacgtccggctccggcagactgtcggcgtcgatgctgtctttatccttcagccaggagatatccagcgaatcggattttgcgctgcggatccactcgcggctgaacttgcgccagcggctggtggcctggcgctggtcagtgttcttgttctcttcgctgtcggcgacttcgctctcttcggcgttaaagctccactccccttcttcacgcggacttaagccgtgtggatcttcgccgtagacagtttcaaacggctgcagatgctgctcggtaaacggcgtgcgcttgccgaagctcggcatattggtccgcaggtcatacacccacacgtcatcggtgcagtttttatcctgatgcggattggtgaccgtgcctttggtaaagaacagcacgttggttttgacgccctgggcgtaaaagataccggtcggcagacgcaggatggtgtgcagatggcatttgtccatcaggtcgcgacgaatatcggtgcccttaccgccttcaaacagcacgttatccggcaccaccaccgccgcgcggccgccggggtgcagggtttcaataatatgctgcataaagcacagctgtttgttgctggtcgggtgcacgaaggtacgggtaatgttggtgcccgcggcgctgccaaacggcgggttggtggcgacgatatgtgccttcggcaggttttcaccgtcgctgcccagcgtgttgcccagacggatagcgccgccgtggtcgaggttgccttcaatatcgtgcagcagacagttcatcagcgccagacggcgggtgccgggcaccagttcgaggccgataaacgcgcggtggatctggaaatcctgagtgtcgccatcaaggtcatccagatcgttagtctgtgatttcacgtaacggtcagcttcaatcaaaaagcccgccgtacccgccgccgggtcctgcaccacttcacgcggctgcggtttcagcagatggataatggttttgatcagcgggcgtggggtgaagtactggcccgcgccagatttggtttcgttggcgttcttctgcagcagcccttcgtacatatcgccgaagtcgtcgcgggatttcccgtggttgccattgtaccagtccagcgcatccatatagctgaccagctcagtcagctgtttgggttgctcaatggtggtgctgacattatggaataccgcctgcaccagctttttctcatctgagcctaactgaaccagcaggttgcggtagaactgcatctgatcctggccaatacgcgatttcaggtcatcccagcggtagccttccggcaggtagtccgcttcctggccggtctctttgcacattttcaaaaacagcagcgaggcgagttcattgacgtagttttgataggagacgccgccgtcacgcaggttgtcgcacagtttccacagcttggcgaccagatcgttattgttcattgaagatcctatttgacatggcgaccaccattgtgggtcgcaaaagtgattgagcgtttcagatgcctgatggcgcttcgcttatcaggcctacagggttaggtgtaggccggataaggcatcgccgccatccggcgaaaacggggatgataccctcttaagccagttcgtcccagatgtaatcgctgaacttatccagcacgctgtcgaggttgtcatcaaaggtgcgctgtaacattggcttaccgcctcgacggtggaaattgccggttttgaagacgtcgtcgtcgagcaccactttctctttcagcgcctgcgctaaacggtcgagccagtttatctgctcgtcgctccagtcgttctcggccttgatacgcgccagcgcgtgatcgacacgctcgtcaaacggtttgagcgcatcgcccaccgccgcgcggcggatatggccgatcaggcgggcggcaatatcttcgttgcgcgtcgctttccacgcgctgcgcagggacgactcttcaaaatgctggcggtcaaaccactcctgcaattccaccagccctttacgggtgaggtcacgcgggcgattgatcaccgcctgcaacgcgggctgggcgttcggggcgtgctgcaccagcgcatcgaacgcttcgaggaaatcctgcggtgtgtcgtagtcgccgtacagcgatttgacgcttaccacctcatcgtcaatatcgaggaaaatgggggcctcacgcagggcgttgatatcggttttcagcctttcgagacgggcgataaagccgggaagcttattgaaaatctcggcgctccagtgcggccctttttcccgcaggcgcgaagccagaccaccaaagttaacgcccgcggcatccaggcacagttcgtccagacggcggacctgcttatctaccgcttcgctgcgatcgcggttatagatggcaagaccgataatccgctgcagcttagcgaccagctgttcatggctgtgttcggcaaaactgcggccatccgcttcgatggttttgtaggtttctgagtcggtaatttcgttgaccagcgtttgcagctccacctgcggacgcacaaccaccgggcgcatggtatcgacgctttccagcgagctgtagatatccacgcagtcgaaaatcttaaagctggttttccctactgacggacacagacgcgtggcgcggcccttcatctgctcgtagagaatgcggcttttgactttgcgcaggaacacaatattacagatagacgggatatccacgccggtggtcagcaggtcgacggtgactacgatattgggcagccgctctttgttaaagcggacgatcatgctttgcactttcttcgcgtctttatcggcatcaccggtgatcttgatgatcgcgtcgtgctcaagctgcggatactttttcttaaacgcgctacgcagctcgtcaaccaccatatcggcatgggcgttggtgacgcagaacaccagcgttttttgctgcccggtgggatccaggtatttggtgagctcgccgcataccgcgcggttaaacgccgggatcaccaggccacggttaaaatcggcgacctcaaaatcctgatcgtcggccagcgtgtcgttgatcagctcgccctgtgggttcaggcgttccacctgttcaccctcggaaagatagaccccgtcctgtgcgttgcgggtgacgatctgaatagggggatcctgatcgatcaggtaaccgtcgattaccgccgtacggtaggtgtagcggtaaaccggctcgccgaaaatatccaccgtgtgcagcgctggcgtggcggtcagggcgatttttaccgcgtcgaaatgatcgagaatgcgacggtaggcggaaacgtaatccagctggctacggaactgcagctcgccttcggtctgctctttatcgagaatgtagccacggtgcgcttcatcgaccacgatacagtcgtagcggccaaccggcatcggttcatcggattgcagcgtgcgcttgaccagtgactgcaccgtggcgacgtgaattttggtgctgtcttccgggaatttgtcggttaaccctttgatatcaaaaatgctgttaaaggtgtcgccgttaatgcgcgtgtcttcaaacgcccccagcgcctgttcgccgagcgagcgacggtcaaccaggaacagcacgcgtttgaaacgctgcgactggatcaggcggaacattaaagcaatggcggtacgggttttaccggtaccggtcgccattgccagcaggatgtgttgctgaccgtttacgatagcctgttccaccgcgcggacggcatcttcctggtaatagcgcaggccgagttcgctcattccgggattttcggcaaaccactgattttgtttctgcggatcgctgcccagcatatccagcagctcttccgggcgatgccattccggcagcgctttcgacatgttggtggtgtggcggacgtcgcgataccagataccgctcttggtcttcatcgccgcgcggtattcgcgcccgttggtggagtagcagaaggggattttaaagcgctgtttaccgctggtgtcctgccagctgatttcatactccggcacggcgtcatgcacttcgtcgggagcgtagtgctccagcagcgtgtcgcgtaaaaatccgttatcgaagtatttactgtagcggtaagactcgttgagcttgctggagacatcggtatttttgcgtttcgcttcaacgacggcgatgggcttcaggccaatgaacaatacgtaatcggcaaagcctgtttttcccgtttcatctgtacctgttggccattcggcaatcgctttattgacgccgggttccgggcgagcgcctttggcaaagcgtaacgttttgctatctgcctgccagcccgctttacgcaactgggcgtcgatcaggaagcgactctcttcttcattgagttccaacgtgcgtttgacagcctggtcggtgatttctttatgataggccttacgttcctgttcggtttgcttcgccagttcggcatcttttgctgcaagctgtgcctccagcgcggccagacgcgctttggtctgggcttcggtttcctgctgtttgccctcaaggatggcaatgtagccgttgagcgcaaccagtctttgctgctgagcttccagttcggcctggctttgtactttctcttgcgcctgacgttccagctgttgtttcagcgtcagcacttcctggtgataaagattctcgccgtgttctggcagaacaaacatcggcaccgggaaatcgtaatctttggtcaccagccggtagtaccagacgctgaggcggaacccgagccgcaggcacatctgggcatcgtccagatcgttatgaaattcgtggacggccaggttaccgatacggcgcagcttatggaaaacagaaaggatgctgtcatcaataaacgcaatcttgcccagttcgcgcagcaggtcatgctggttttcgcaggccggtatatccagcaactggccgagatgtttcgcggtggcttcgccaaacatgcgcatttttatcagagtggtattaggatcgtccggatagttgttttccgccgcgcaggcgatggcgtaaatgaagtcgttgacgcctttgagaaagtcgaagttagatttgttcatttttatctatccggttcctgagcgggaagacgttattaccctgtgccgtaaagggaaaataacagacccatggtagacttcatattgtgtgtgatcaacgaacaatcagagagtaactgcttctttcctaatgctttcctgaagagtatcgttctccggcggggtatctaatctatatcaatagcagggatggatttatggctgttccaacatatgacaaatttattgaaccagtgttgcgttttctggccactcgacccgagggcgctttggtcagagaagtgcgtgaagctgcagccgaaatgcttgggttagatgagcagcagcgtgcagaggtgattaccagtggacaactgacgtaccagaaccgcaccggttgggcgcacgatcgtctcaaacgcgccgggttatcgcagagcctatcccggggaaaatggtgtttaacaccagcgggaatgagctgggttgcctcgcatccgcagccgatgaccgagctggaagtgagtcattttgcttgtgattttaacggcgtaaagctcagtaagctggcagatgcggtggcgttagatccacagccagaatcgattgaggatgatgagcttgccagaagcagcccggacgatcgcctggagcaagcgctcaatgagattcgtgaatctgttgccgaagaattgctggagaacctgcttcaggtttcgccggcgcgttttgaagtgattgtgttagatgtgttgcaccgcctgggatatggcggccatcgcggtgatttgcagcgcgtagggggaaccggcgatggcggcattgacggtattatctctctcgataagctcgggctggaaaaagtctacgttcaggccaaacgctggaaaggcaccgtcgggagcgctgaagtcaggggcttttatggcgcattgcctgagcaaaaagtgaaacgtggcgtctttattaccacctcaggttttacggcgcatgccagagactatgctaacaaagttgaaggtctggtgctggtggatggcgacaggctggtgcatctgatgattgataatgatattggcgtatcctcacgtttactcaagttgccaaagctcgatatggattactttgagtagtggtaacgctggaacctgattgcgggtaattgagatggaccacgttgtgggcacctgtgtttcctctcgcccagaaatcacgtgactttctatggctgcgtatcagcctaaacccatgccggatagcggctgcgccttctgcggcctactcttctggtcaatttccttttatctcgaatacacaaattgtgaagctatttccaacaatccaggtataatcgtaagataattgtatatacatttttgtatgtacaattagggaaaacacatgccgatggagtttgaatgggatgcgaacaaggctaaaagcaacctgaggaagcacggtgtccgttttgaggatgcggtactggtgtttgacgatccccgacacctgtcacgtcaggagcgttatgagaatggagaatatcgttggcagaccctcggccttgttcatggcattgtggtcattctggttgctcatagcgttcggttcgaaagtggttttgaagttatccgtatcatcagcgcccgcaaggcagacagaaaagagaggaatcgttatgagcatggttaaacataaacgcggcaacgcatccgcgctgagtgctcagcatgaggctgaactgaaggcgctggcgaaaaaatcagatgatgagattgattacagcgacattcccgcttcggaggatgggcagtggtctgaagcagtgcgtggtaagttttttcgcccgttaaaaactcaggcctcggtgcgtattgacgccgatgtgatggagtggctgaaacggccaggaaaaggctaccagacgcggctcaatgccattctgcgcgaggcgatgctgcgcgagcaaaataagaaatagcccgaagatgccggatggcggctgcgccttatccggcctacaaattcccgccaggccagataagcgcttaatggttacttccttaaccccacaaatgccgctctgatctcgtcttccggcaactggatcccgataaataccagcgtgctgtgcggcgtttcgtcgccccacggtctgtcccagtcggcgctgtagaggcgctgcacgccctggaacagcaggcggttgggttcgccgtcgatccacagcatccctttgtaacgcagcagtttatccgctgattccagcagcaggttttccatcacccgcgacacctcgctgatatccaccgggtaatccagttccaccacaattgacgatacatcgttctgtttatcggcaataaagtggaaacgcggttggcttgccagcacgttctcttccagcataaagccgctggtattaaacaactgactcaggtcaatatcgccgtgtaccacggtgtaaaccggggcgcgggcgttgatacgcgccagccgctcgcgcagtttctcgctgtcgcctgccacgtcggttttggtcaacagaatgcggtcggcgtagcctatctgcgactgggctatggtgaactgattcatctgctcgttagcgtgcaccgcgtcgaccagcgcaatcacgccgtctaacaggtagcgttcgcataatacgtcatgggagaaaaaggtctgaataatcgggccggggtcagccatgccggtgcattcaatcaccaggcggtcgaaagcaatatcgccgcggtcgcggctgtcgagcaggtctaatagcgcatcttccagctcgttggagcgggtacagcagatgcagccgttagtcagggttttgatctgtgtggcgcgatcgccaatcagttgatcgtcaacggagacttcgccaaattcgttttcgataacggcgattttaaaaccatgttgttcgttgaggatatggcgtagtagggtggttttgccggcaccaagaaaaccggtaagtagggtaactgcaatcggggtcatagtctctccattaacaacagcgcataccgcctttgccatcgccgccgtaacgtgcttgctgacgttcgcggaagaactcttcataggtcatgtacggcttgtcgggatggttggttttcatgtgctcgacatagttgtcgtagtccggaataccaatcaacatttttgccgcctggccgagatatttttttgcctgacctaaagtatcaaacattctgccgtcctgttaatgaataaagccggatggcggcttgcgccttatccggcctacactagccggggtcgctgtgcgctacccggcatcagttttagtggtgtgaagagatcttcacgccgccttccggcacaggcacatacggggtttctttgtcggtacgtttatcgctgttgcgtaccttcatccaggtggtgaaaccgtagaagataatactgtacaccaccaccaggaacagaatactcaaaccagcgttagtgtagttgttcaccacgatatggttcatgttggcaatctgctgctcggtcaggttggcgccgttggcaatcttctctttatacaggtttgccatgtagaagaaaccttccatctgtgggttggcgctgaacagtttcaggcccagcgcccaggtggtgcagatcagcagccataccgccggaattaccgtcacccagatgtatttggtgcgctgcattttgatcagtaccacggtgctcaacaccagcgccacggcggccagcatctggttagagataccgaacaacggccacaggctcttcacgccgcccagcgggtcgaccacgccctgatacagcagatagccccacaaaccgacgcagcctgcggtaccgatgatacccgcgaccagagaatcggtttttttcaggaacgggacgaagttacccagcaaatcctgcaacataaagcggccggaacgggtacccgcatccagcgcggtcaggataaacagcgcttcgaacagaataccgaagtgataccagaagcccatatccgccatcggcaggactttgtggaacacatgcgcgatacctactgccagcgttggcgcgccgcctgcgcggttcaatactgacggttcaccgatatctttcgcagtttgcaggatttgttccggggaaatcacaaagccccaggagctgacggtcgccgctgcatgtgcggtaacgtctttcaactgcgccataatcagcggcgcgttctcgccgcccatctcgtgcaggtttggcatggtaatgcccagacctgccggcggggtgttcatcgcgaagtagagacccggttcaatgatcgaggccgccaccagcgccatcaccgcaacaaaggactccatcagcatcgcgccgtagccgataaaacgcgcatcggtctcacaggccagcagtttcggcgtggtgccggaggagatgagcgcgtggaagccagagacggcgccacaggcgatggtgatgaacaggaacgggaacagagcgcctttccacagcgggccggtaccgtcgacatactgcgtcaatgccggcatttttagttccgggttgaggatcacaatccccagcgccagaccgacgatcacgccgattttcaggaaggtagcgagatagtcgcgcggggcaaggatcagccataccggcagcagcgcggaaacaaaggcgtagccgatcagcgcgaaggtaatggtggtgtctttaaaggtcagcgccgggccccagtaagggtcgtgggcaatcacgccgccgaagtaaatagacgccaccagcagcacgataccaataacggagacttcgcctacgcgtcccggacgcaggaagcgcatgtagatgcccataaacagcgcaatcggcaccgtggagcagacggtgaagacgccccacgggctttcggccagcgctttaaccacgattaatgccagcaccgcgaggatgatgatcatgattaagaagcagccgaacagcgcgatggtgcctggaacggtacccatctcttctttgatcatctcgccaagagaggcgccgttacggcgggaagagatgaacagcaccataaagtcctgcactgcgcccgcgagcaccacgcccgccagtaaccacagtgtccccggcagatagcccatctgcgcggccaataccggcccgaccagcggacctgcgccagcgatggcggcgaagtggtgaccaaacagcacgtagcggttagtcggcacgtagttcaggccgtcgttattgataaccgccggcgtcgcgcgcgtcgggtcgagtttcatgaccttctgggcgatgtacaggctgtagtagcggtaagccaccagatagacggaaacggaagcgaccacgatccacagggcgctcacgtgttcaccccgacgtagggcaacgaccgagaggcagaaagcaccgatgattccgagaatcacccagggtatgtgcttgaatatctttttcgtatccatagtaaaacctggttgtaagtttaattatcagccgaagctgggtggacattgagttcgtgtttgaggaggtagattgactgctatgctgagaggatcttgccagatcatcgtgcgcgtaaagttaggtaaatcagtgagtggttgtatggcggtttaagcggtcggacgtaccggtaagcggtttcgcggaggagggcgtgggctattttatgtgattgagatcacgatataaaatgggacgatccttgttgcgcggggcgtcataacgacttcactgagctaatcgtgatattaatggcgcgcatcccataaagttttccctttccaggccgaaaattctgtatctgtctagcggaaagagaaaacatgttaaagcgaattaaaattgttaccagcttactgctggtattggcgctatttggccttttacaactgacatccggcgggctgttcttcaactcgctgaagaatgacaaagaaaacttcaccgtattgcaaactattcgtcagcagcagtctgccctgaatgcaacctgggtggagctgttgcaaacgcgtaataccctgaatcgcgcgggtatccgctggatgatggaccagagcaatattggcagcggcgcaactgtcgctgaactgatgcagggggcgaccaatacgctgaagctgaccgaaaaaaactgggagcagtatgaggcgttaccgcgcgatccacgtcagagtgaagcggctttccttgagatcaaacgaacctatgatatctaccacggcgcgttggcggagcttattcagcttcttggcgcgggtaagattaacgagttttttgatcaaccgactcaaagctatcaggacgcttttgagaagcagtacatggcctatatgcagcaaaacgatcgtctgtacgatattgctgttgaggataacaacagttcctacaaccaggcgatgtgggtactggtcagtgtgctgattgccgttctggtggtcattatcgccgtctggttcggcatcaaactgtcgcttatcgccccgatgaatcgtctgattgaaagcattcgtcatatcgccagcggcgatctggtgaagcgtatcgacgtggaaggctccaacgaaatggggcagttggctgaaaacctgcgtcatatgcaaagtgaactgatgcgtaccgtgggcgatgtacgtaacggcgcgaatgcgatctatagcggcgccagcgagattgcgatgggcaacaacgatctctcttcccgtactgagcagcaggcagcgtctctggaagagaccgccgccagtatggaacaactgaccgccaccgtgaaacagaacgccgaaaacgcccgtcaggccagtcacctggcgctgagtgcgtcagagacagcgcaaaaaggcggcaaagtggtggataacgtcgtacaaacaatgcgcgatatcgcctccagttcgcagaaaatcgccgatattatcagcgtaatcgacggtattgctttccagaccaatattctggcgctgaatgcggcggtagaagcggcgcgcgcaggcgagcagggacgcgggttcgcagtggtggccggtgaagtccgtaatctggcccagcgtagcgcgcaggcggcacgggagatcaagagtctgattgaggattccgtgagccgtgttgatgtaggttcgacgctggtcgaaagcgccggtgaaaccatggatgagatcgtcaatgcagtgacccgcgtgaccgatatcatgggcgagattgcctcggcgtctgacgagcaaagccgtggtatcgaccaggtgggcctggcggtagcggagatggatcgcgtaacgcagcagaacgcctcgctggtggaagagtccgccgccgcggctgcggcgctggaagagcaagccagccgtctgacccaggccgtcgcggtgttccgtattcaccagcaacagcagcgtgcgcgtgaagtggctgcggtaaaaaccccggcagccgtgtcgtcaccaaaggccgcagtggccgacggcagcgataattgggaaacattttaagggcgtagtggtgaacagtcggcctacagacgaccgtaggccggatgagatgttcacacttttgcctgatggcgtagcgcttaccaggcctggcagtccgcgcaggccgattttaaaccagcatcaggcgcatggtgcagcgtgattcatacgccaggccgtgcgccgcttcctcctctcttttctgatatcgcgcgctaatccaacgttgagtgaaggtgtgcggtgatccacaaaaaatgaataaagcgagagaacgcacggcaggagagccttgtttcgcggcatcataattgctgatgtgataatcgtgagaggatacgatgcgcaaagatgccctgcttgctttcctgatgaaccaaacggatttttttgatccggaaaatgtcagtgaggtgtttaccgcgcgctatctggcgcagcgttttaatatgcagcgcaataccgccagccattatctgaaccaactggtggcgcagggcgtgctctgcaaaatcaatacccgtcccgtctatttcctgcataagcaggcatttagccaacagttttttaccctttcgcgtaatgaatacgccagcgtcgcggagctgttagcgcacggggaacaggagtgcgcgccggacgatcacttttccctgttgattggccataacgaaagcctgaagcgcccgattgagcaactgaaaaccgcgctgttttatcccgacggcggactgccgctactgatgaccggcgaaagcggcaccgggaaaagttatctggcgcagctcatgcacgaatatgccatcgcccaggcgcttctgtcgccggatgcgccatttatcagttttaattgcgcccagtatgcgagcaatcccgaactgctggcggcgaatctttttggctatgtgaagggcgcgtttaccggcgcgcagagcgacagaccgggcgcgttcgaggcggctgacggcggcatgttatttctggatgaagtccaccggctgagcgccgaagggcaggagaagctctttacctggctcgatcgtggtgaaatttatcgggtaggcgacaccgcgcaggggcatccggtttcggtacgtctggtatttgcgacgaccgaagagatacacagtacctttctgacgacatttttgcgacgcatcccgattcaggtcaacctgccggatctccagcaccgtagccgccaggaaaaagaggcgctgatcttactgtttttctggacggaggcgaaaaaactttcggccacgcttatcctcaaaccgcgtttgttgcagatcctcaatcagtatgtttatcgcggcaacgtcggcgagctgaaaaatgtggtgaagtatgcggtggcgacggcatgggcgaaaaagcctgggcaggaaaccgttaccgtgtcgctgcacgatctgccggatgccatgctgtcggcattgccgtcactgaatgaaccgctggcggacgacacgccggtgagcatctcgcccgacacgaaccttacctggctgctgcgcgcccgcgacgagatgcagggcatgatccatgatacgcagtgtcatgtgctggcgctgtacgagctggtacgtagcgggaaagaggggtgggagacggtacaaaaaagaatgggcgatgaaattgagaccctcttcgatcgcctgatttttaccggcgacgataatgtgcactcacagcggttgctgttaattacaagccaggtgcgggaagagttttatcgtctggagaagcgcttcaatatgcagcttaacggcaactgtatttacgcgcttagccactatttaatccatcgtaccgcactggcgccttctcgtctcaacagcgagcagatccgccaactggacgccttcctcgcccagaaatatccgctgctgtacagcttctgtttacaaattctggagacgctgggccagaagctggatctggagccgagacgcattgatatgctgctgctggcgctttggctgcataaacagggggctaacaaccaaaaacaggtgacgcatgcggtgattctggcgcacggctatgccaccgccagcagtatcgccaacgtcgccaaccggttactgaaaaatacgatttttgaatcgttcgatatgccgctggacgtcacgccggaggcgatagcgcagcaggtgatgcgctatctggaagagcatccgctcgcctccggcctgatgattctggtggatatgggatcgctcaaggccattcatcgtcattttgatcgcgcgctttccacgccggtgacgattatcaacaacgtctcgaccagcatggccctgtatgtaggggagcgtattttacaggggcattttattgaagagatcgctcgcgatatcgcccgggatgtgccggtcgagtatcagctctactggccgaaaagcaacaaaccgcgcgccatactgaccacctgcgcgaccggtatcggtgtggcgacgaatctttgcgcattactgagcgccagtattccgcaggcgctggagattgacgtcgtcgcctgcgattatgcgatgctggcgagcaataaaacccaggagccggtatttatgcgctacgacgtactggcgatagtcggcacgctggacccgcacatcgccagcgtgccgtggatttcgctcgactcgctgatctccggcgaggggaatcactatctgatgcggctgtttggttcgctgaccacgccggagcaggtggcggagatcaacaacctgctgctgaaaaacttctcgctccgacgagtgatcgaatccgtcaccatcctcgacaccagcaaagtcatcaaccacgttgagcagtttctgctgcgctatgagcatctggcgggcgttaccgtctcgaatgaaagaaaggtggcgctctatgtgcatattagttgcctgattgagcgtctgatccgccatgcgggcattactgcctggagtgggcaacagtgtccggaacaggaactgaatcggctacgggaagcgtttagtgtcattgagagtaactacagtgtcaaaatccccaccgccgagcttggctatattcataatatcctgaccttcgaaacagaacttatcgagcaagatcaacagttttaactatttccctctgttaacccgcatcttttttcggcgcgccactttttctggcacgccgcttgctctcttttatcacagtggaatgtgttttagaggtcaggatgaagagacattatattttcgccagccacggcacgctggccagcggagttttaaactccgtggagctgattttaggcaaacggtcaaatgtctggacgctgtgcgcttacgttgaagagagcgtggatttaagccagcaggtagatacgctaattgcccggatcccgccggaagatgaaattattgcgctgaccgatatttttgccggcagcgtgaataacgaatttgtccgttatttatcacgggaaaattttcatctgctggcagggattaacctgccgctggttatcgatctctttatgtcggaaaacgatggcaataccacgcataccataatgacggcgttagcggattcaaaagaaaatattcagtactgcaatcaaactatcaccagcgccatgcaaagcgataaagatttttaaggggaggaagcgtcatgattgtttttttacgggtggatcatcgtttattacatggacaggtcgccttttcctggacgcagtacgttggcgcagactgtattttaattgccaacgacagcgtacctaatgatgacctgcgtaaaaccaccattaagatggcgaagccgcccgcggtgaagctggttattaaaaatattgccgattcaattgaagcgataaaaagcggcgttaccgataaatataaactttttattgttgttgaatccgtggcggatgcgtaccggctggcgcgcgaattacccgacattaaaagtattaatttaggcggcacgaaggtacgtgaagggagccagaatattgctaaagccatcaatctgttagcggatgaaatgactcaacttcgggagctggcggctggcggagtagagatagaaattcggctggtgcctaacgatcgtaaacaactttttgcctgagcggataccctcctgaggacatattatggtagaggcgcttttacttggactggtggcgtttatcgcccagtctgaatatgcattagggacgtcgctgatttccagacctatcgtgaccggacttttaaccggactggtgctgggcgacatggaaaccggaattgtgatgggcgcgacgctggagttggcgtttatcggttccttttcggtgggcgcgtcgctgcccccggatgtggtcactggcggtattttaggtgtggcctttgcgattaattccggcgctggggcggaaaccgcgctgttattaggtttgcctatcgcgacactggcgttaattgtgaaaaatatctataacggaatgtttattccgttgctctgtcataaagccgatgcttacgctgaggtgggggatacccggggcattgagcgtatgcatttaatctccggcattgggctgtcgctgatgctggggattatcgtcacggtctcttatttagcgggcgtgaatatggttaaaggttttctggatgccattccagaatttattaaacatggattaagcgttgccaccggtattattcccgcgctgggttttgccatgctggcgcgcttattaattaataaaaaggtcgccccctattttttcctcggttttgttttaatggcgtatttaaaaattccggtgacgggtattgcgattctcggcgcgatcgtcgccgtcgtgatggtcaatatgccgaaatttgcggcctcgcaaccggcacctgcgcaaggagcgtctcatgacgatgaagatgatttctgataaagaccgccagcaggcggaaaccactggtctggtcaccgcgcgtgatttacgccgcgtcttctggcggtcattccagatggagttttcctggaactatgaacgacaaatgaacctggcgttcgtctatacgctcattccggtattaaagaaactgtatagccgaaaagaagatcttgccgaagcgctaaaacgccatctggctttctttaataccacgccgcacattgtgacgttgatcctcggtattaccgtggcgatggaggagaaaaatagccagcagaaagagatggacgccagttctatcgataacgtcaaagcgtcgttaatggggccgctggcgggtattggcgactcttttttctggggaacattgcgtcttatcgccactggcatcggtaccagtctggcgctgaaaggcaatattctggggccgattttatttctgctggtgtttaacgtaccgcatattctggcccgctggttctttacccgctggggctatgtgctgggaaccggcgtactgcaacgcattcagcaaagcggaatgatggaaagcctaacctatggcgcctcgattatcggtctgatggtggttggcgcgatgacggcctccatgattgatatcaccattcccattacgtttggtacgggagaagcgaaaacccatgttcaggacattattaacgacatcatgccttgtctgctgccgttaattagcttcgccattgtgtactggctgttagggaaaaaagtgaaaccgttaaccatcattggcggtattgcgctggtgggaattttcggttcctggatagggttattttaagagggatacacaatgtcaccaaccatgctgacctatattaacgaagagtctgacgtcctggcgaatattattcgccgccatcgccagtctctggaagaagtatcgcggttcgccagccaaaaaacgttacgacgaatcctgatattagccaccggatcgtcattgaatgccgccttttgcgcccgttatttctttgggcgctgcggtatctctatcgatattaaagagccgtacacctttagccagtatgagaatagcgatccgcaagccgatatggttattgctatttcccagagcgggaaaagcgcttctaccctggaggcgatgcgtaaagttcaggcgcagggacgtccggtattcgctctgaccgccgatccgcaaagccctcttggcaaggccagtgattatccactggatattctgaccgggattgagtccgtcggctttgttacccgtggatttagcgcgacggtattgaatctgttgcttatcgcgttgttaattgcccgtcagcagcagcgactgacggaatcgcaggtcgaggagtatgtggcgcagcttcaacgtatcgcggcaaccctgccgttggttatcgtgcgtacggaagcgtttattcaccagcaccaggccgttttacgaaacgggacgcgttttgtggcgacaggctacggcgcgctggttggggtggcaaaagagttggaaactaaatttaccgagacggtgcgtgttccctcaagcgggtttgagctggaagcctatatgcacggcccgtatctggaagccaatgcggaacacgtgatgttcttctttgaggaccggcccgacgcgcgctccagggcgctacgggagtatatgacgcctgcggtcgccaaaacctttactctcacgctggcgaaggcggcgcaggatgaccagacgcttgcgctggatgtagcggttgatcaccatttctcgccattactgttgattgtgccggtacaactcatggcgtttcatatcgcctcactgaaaggcatcgacctttcggtacgcatttttgacgatttcgatcgcgttttaaaaagtaaaatctgaacaatcaggagaaaaatatgttgggttttaatcaggacgagtacctgacgagtgctcgtgagatcatcgctgcgcgccagaaggcagaacaggttgctgacgagatttatcaggccgggttcagttctttatttttcgcctctgttggcggttcactggcgccaatgatggcaattaatgaatttgccaaagaattaacaacgttgccggtttatgttgagcaggcggcagaattaattcataaaggaaataagcggctgaataaagactctgtggttattacgctgtctaaatccggcgataccaaagaatcggtggcgatcgccgagtggtgtaaagcgcagggaatacgcgtagtcgctattaccaaaaatgcggactctccgctggcgcaggcggcgacatggcatattccgatgcgtcacaaaaatggcgtggaatatgaatatatgctgctgtactggctgtttttccgcgtgctgtcgcgcaataacgaattcaccagttacgatcgcttcgccagccaactggaaattctgccggcgaatctgctgaaagcgaaacaaaaatttgatccgcaggcggacgctatcgccagccgttatcataacagcgattatatgatgtgggtcggcggcgcggagatgtggggcgaggtctatctgttctccatgtgtatcctggaagagatgcagtggaagcgcacgcgccccgtcagctctgcggaatttttccacggcgctctggagctgctggaaaaagacgttccgctcattctggtgaaaggggaagggaaatgccgcgcgctggatgaacgcgttgagcgttttgccagtaaaattaccgataacctggtggtgattgatccgaaagcgtatgcgctggacggtattgatgatgagttccgctggatcatggcgccgtgtgttgtttcgacattgttagttgaccgactggcggcgcactttgagaaatataccggccacagtctggatattcgtcgttactaccgtcagttcgattattaacagaaaggggcgtgtagcatatacagtgcctgatggcgcttcgcttatcaggcctgtgcgccagtttatggataaagatgatgtgtaggccgggtaaggcgcagccgccacccggcatatatgacattctcttttaactttcaacattcaccactttgatctccaccatgccaatccccaatttgcgcggcgaatggcccaaaatattaccttcgttggtggagacgggagcgggcggcgcaatgactaaggtattcgcgtccgtcgggttgttgaaatgcagcgtgatagtggacacatcgtgacccagcaccagcgtctgttcttcgttgcctacgcgtaccggaatcggtcgattcgcgttgtcgccgaaggctttggcggtgatcaccagatcaaactttttcggcagcggcgctttatattcgattttaacctcatcgcccaactgcgcatttgaccagcgcccccaggactccggccgggaaatgccgctaaactgcttcacctcctccggggcgcccgccacgttaaagataaagctatcggctttataacgaatatcgttatcgacaatctttaaggtatcgacgttgcctttgtagcgctccatatcgatcatcgtgtctttaaacgccgtcttaccctgccactgcgctttatcaacatgctgtacggtttgctgcccgccaagctgcccctgcgagacgcaccagtcggtagagagcgccagcgccggcgcccatagctgcgccattttgtagcagcgatcgatccaaacgaaattatcgcgcggggcgaagtcggccaactggaaccgtagcggagcggagtattcactttccggtaacggctcgacgcgcttatccgatacgcgcagtagtaacggcaggcggaagtggctcccggaaaacgcgatcatgtttttgtcccgatcgacggtaaaatcttttatctctttcgggaaattccacaggcgaatgatatccggcttcatcgccagcactttctcttttacattcaggaacacttccgacagcgactgcccggaaaggctgctacgtcccagaccgataaaattatcgccgccgagaatatccagcaccgttgcgccgttgtccatcgtgttgcgtttgaccgccagagtctcctgctgtggtttatcgccgcgcagaatgaaaaacagattgttgcgatcttgcttattcaggtatttccaggccgtattgttcatcgccagatggtcggaagagacgacgataacggtatctttaaaccacggcgacgctttgattttgttgataaactcggcgatgttttcctggctgcaacttacggcgctaaaggactggttgggcttgccgtcgtaatcgtagcgtttgcggttgcaggtgcgtgagataaacccgtccgggtggtgagtatctacggtcagcgtaaacagcgaaaaacgctggcctgagcgggaaagcgcttcaaatttcttccatgcctcatcaagcaccgtatcgtcgtagaagccccagtcgttacgataagacgggtccgccaccaccgtttttagctcttcagcgccgtacagatgatcaaatccgtgtgatttcaggaacacgtctttcccggcaaaacgcaggttagcgccctgcacgaaatagttctggtagccggagtttttcagaatatcgccgaggcagatattctgcgggaagaagctagaaaccgacgcggacgcattgccctcaaacggcgcaaacagcggaataccgcactgggaagccaccatcccggcgatggtgtaatccgttcccggcagttgcatggtatggctgaaatccagcccctcatttttcagcgcgcccaactctggcgtgagattggggaacgcgtcattatcaaaataggtccgttccaggctctcgccgtagatatagaccagattgagcttcggattaggaatggtttttgctggttctttataataaacggcaaaatccggatcgccatcgcgcatttgtgattttaccagttcggtaatctggcgaaacgccgggctggcgtcgaccgaacctaacgccagcagtaacgccagcaggctgtaaccgacatgatgaggatggtgacggcggcggcgtagtacccatcccagcgcgccgaataccgccactaacgccagggcaatgccgattcccggcagaatatatttgccgactcccgctcccgtcagactattcgtgagcgtataaagcactgcgtcgttgatcccgtcgccggtaaaatagtcgctggcatacagggtaatattcagaatgacaaaaagtcccagcaccgtgagagtggcggcaaaccaccaggtgttacggcccgccttccaggcatatatcagcacagaggcgagaaacagagcgacagagagcaactcggacaactgacgatcctcaataaaccaggcttatcgctggcaggaaaaaatttctaacaatgtaatagcgatgtcacattgctgcaattctaataactttacacggcgctgttatttagaatgagtttagaaagttggttttttgatcggcatcacttcctgccatagcggttaataacaggaaaagacgaagagaaaaatcgggttaatgccgtgttggcgggtaaagggccaaaacacggcgtttatcagggcgtcccggcgtggcgcacggtcagaaaaacgcagtcaggagaggaaattcagcccttgctgcaacaccagatcgcaagctttggttttcaccttttccgccagcggcgtactgccgatattattgaggttcaactgctggccgtccttcgtcttgagcaacccttgcaggccgttcaggtagttagtgtcctgctcctgctgtgtggtatccaaccccaacttgttcagaatctgatttttaacgttttccacgttggtagcggacgccagtttctgtttggcgcagtactgcaaaataccggcggcattattcatattatcggcgctgagcgactgggcacctctgctgagcagaccggttagcgcagaaagcgacatcccgccctgctgtgcgttcgcgccctgagcgcttaactgactggcggcaataccgctggtggaaatcagtacgctggcgatcgccgcgcagcacagaacatgtttcgctgtattcatggtaatcacctgtgttatgccagtcaggcgtcgtatcgccctggcgcacgttgcaatttaatactctttacccgtcacccggctgcggtaactgtcccaggtaaaattaacccataaactgttgccgagacgcatacggtccatgacgcgttcgccaagcattttcgtcatctcttccatattgctgttcgtcaacatgccggtgggacgttttgacgaggaacgacgatcgacaatttgattgatgatcactttttcatagcgggattcggtctgcacgccgatctcgtcgatcaccagcagatcaacgttactcagatcgttaagcaactgctcttcgctggtttcccgattgctgaacgtgtctttcatcgctgacataatatccgctacggtgataatcagtaccgactttccgcgcagcagcagctcgttacaaatagccgcggcgagatggtttttaccggttcccggcttgccggaaaagacaaagctggcgatattgccgtcaaactcatcaacgtactgtcgggctttgcttaacgcgttcatttgtccgtcgcactcaacccgatagttatcaaacgaacagttctgatgcagcggtcgaatgccggaacggttaaaggtgcgctgcattttcatcgcccggttttcccgcgccagcgctgccgcccggatctcgccttgctctttctgccacgccagcaattcttcgcccgttttaaacgccggcgtaatatgcgcaggcatcattttttgtagacgctgcatcaggtcgccaacatttttcatcgttaccccctaaaacctggtggaatatgattgtcaggttcgctgacgctattgatgtcgcgctgcggcattccgccattgctggaacggctgatttgcacgctgcgcgccagcttttgctgccactggatatggtgaaaaaccttaccttccgcctgccagtaggcgataaacgccgccagctcttctgcggtgaccggctcccgaagcgccacgccccaaagggcagcctgacgctgaaaatccgcatccggttgccaggcgggatacatggcgaattttccgcagggaatcgcaacgggggcggcttcgggttcttcgtaaaattgtgcgtctaacgccacatcgcttcccggacgtgataacttttcttcaagcgccagcagttcagccatgcgtgcaggcgtcacggcataaaaggcaggcgcattattagcgaataccgccactgcgccgcccgttgacttcgccagcacagcatgatgatcgtgtaaaaggacgtcaataccgatgacgtccgacgttaaaattctggaagacataatgtttctcaatatggaacaacaaccgagaagggcgactgtttttatagtaccacacagacctgtaagaacagcaggaggcgttccaccaatcacacgcgggggcgtttgcggtacagccataatcccggtacagagaggccaattgagagcgcgccaacaatggaagaggctttcagaaaattggtcagcagcgtaatcatcatcggttcgctatagcccagatggctaatttttactgcggaaatcatcgcggtataggcggaaatccccggaaacatcgggatcacggccgcgacggtaaacactttagggtgagcgagataccagcgtgaccactgaataccaatactgccgaccagcagcgaagccataaacgttgaccattcgatattaaaaccagcgctcatcatcagcatacgcgagccatgacccagcgcccccagtagcgcgcaccacggaagcgcccggtggggaacgttaaagaccatcgcaaacccgacggcggggatcgcagacaagatcatgtcctgcattagcgccagtaaaaagtcgattatacccatcctcgtagcccccatactgtcattgacatcactacgcccacacaggtggccagtgtcaacaggctggcgatagcccagcgcgccagcccggtattaatatgtcctttaaacatatctgcgacggaattaatcagcggaaagcccggcaccagtagcagtacgctcgccgccatggcgatagtgggcgtctggctaaaggcgggaagggtgagcatcagcccggaaatcgtggtagcgacaaaggcggtaatgcaaaaattgatctgcggatgtaaatgccgctgcgccagcatctggcggatatacatggctatcatactggcgaaaaaggtgataaccgcgccatcccagccgccattattcagcttacaaaagcaggagcaggaaagaccgaccataaacgccaccagccagcgcggataacgcagcgggcggagctggctaaagcgtttttccacgcctttgtaatccagcagacgatgttccgcgaggataacgatatgctgaacctccgtgacgacgtgcatattaatgccgcgatcctggtttttacgtgtcgatgtcagacattgtccgtctttaatggtcgtcaggacaatggcgttagaggagatcgcgctttcgacgctatccataccgagcgccaaaccgagtcgggtggaaagctcatcaaccagtgcgctttccgccccgtgctgcaataaaaacagcccgcattgaatacataaccgtgttactgctcgttgaattgattgctcttcttgcatgactcgtcctgtccgaaaagacattctatgcgccgccactatgacagaggcttcctttttaacacgaagcacaggcatgatggcgttggttaagatcaatttcttgttgataaaaacgtcaaccgccagacgcaacgcataagcttcctgagacgtgcgcttcgtcacaggcaggatatccttatgggcgacggttctcgtatgtccgtttccagaatagaggcattatgccagcctggccgctcatttttgaatcaatgatgtggtgaattttatcaacgatatgcattaatggtttaacaacaatggcgtgagtagcgggcgtaaaattaggcatgacttagtataattcgcagatattacatgagttttatggatggtagacagtattgttgggcttttgttttaggactcagcaatatgaatgaagggcgaactcatattttaaatttattaatatgatgcgttttcgttagaattactaatgtgcaaatttagttaatttaattgtcttgcttctggttttatgagtaactatgcgatagtgatttcatgtttttgtgctatgtggattgtagcgcaatcaatgttatatttttaaaaataaaacaaggataattaatccactcggcttatatttctttgcgctcattgttaatagtgtttttattaatggggcaatgaaaagtggcggcgtgggtgcggaggaattatgctgccaggatgctgcaaaaatggacttattatcagtaaaacccctcttatacaggaaggccttaaaggggctataacaggtaatttccccgattataaactggcgtattgtcgtacgatagaagagctaacgctgctacagctacgccgaagtaatttagttattgctgatttagcagttaacaatgcctctccccgcgctatctgcgaatatttttatagcttactctcgcaatatcgcgacatacattgggtatttctggttcctaaatcctgctatccacatgcggttgatctcctgatgggccccgtcagcaccttgctttcagacgaagagccaatcgagaatcttattagcgttatccatgcgggaaacgctcgctcagaaagaataagcaaaacattattatcgcctcaggtaccgtctgaaattcagcagtcccacgacaggccgattgtccttacgctgtctgaacgaaaagtattacgccttttaggaaaagggtggggcattaaccaaattgcggcgttacttaaaaaaagtaataaaacaattagcgcccaaaaaaatagcgccatgcgacgcttatcaatacacagtaatgcagagatgtatgcatggataaacagttctcagggagccagagaattgaacctaccttcggtatatggagaaaccatggaatggaaaacagaatcagcaagagaaatgttgcgctcgtagaaaaatgcgtgatgagcaccattggtattaaagggctatttgatgcaatgccggattgccgacatacgcttcatattttttcaaaaccatccgcgttttataaggctgcgctaacgacgccgttttctgccgttattttttctctttctgcgttaagaactgaacgccggacaggattatccagcctgacggaactggcgataaattatccccatatgcggcgtctggtgattgccgatgatgatgctgaagctcgcttaatcagcgcgctatccccgctgccgctggatggggtcatcagcaaagcgtcgccgttggatgttttacaggatgccttatttacatcgcttaatagcgcccgacggacaacggagcgtacagacaatctttgggagcttcaccagaattgtatgcttagtccaaccgagcgggagattctgcgttttatgtcgaacggctactcaatgccgcaaattgctgtccagttagaacgtaacattaagactatccgagcgcataagtttaatgtgatgtccaagctgggcgtgagttctgatgccgggttactcgatgcggcggatattctgttatatctgcgcgccggcgatgctaccgcgctccagcatcgggtatagcccgcgccggatgcgccgtgcttgttcggggaatcagggtgccaggcacgttattggcacacgtctacccaggtcgccgatgtcagttcagccattctttccggcgtgatgcgtaccgcgctgtgcgtggcgcctgcggcaggcaatacttcgttataccccttcagagagatgtcgcaataaacgggcagcgggtgctccagcccgaaaggacatacgccgccgacaggatgtccggttgcattgaccacttcatcgctgctcaacatacgggcttttgcgccgaaagtggttttaagcttcttattatccaggcgggcatcgcctttcgcgaccaccaggataatggtgtcttttactttaagcgagagcgtcttagctatctgccctggctctacgttgtgcgctttggctgccagttcgacagtcgctgtactttgatttaattcgataatttcaatatcgggagcatgatcggccagaaattgccgtacagattgcagactcattcttctctcctgagaccttaccaatagccacggtagacccaaaaatggcaaaacgtaatttggcatacggagagcgccgctgtaaatataataatgtgacaggccagcagcagtaagccgtgacgataactgaaggcaacgtaaagcggtttactttagcgtgcagtcgccgcactgctgtacgtcaggtaagcggtaacgttggcagcaggttctgcgtaccagaagaccgtcgcgcattacgacggtccgccacagcgggttatcctgaccgtcggatagctgcttttcaaaaaaacagcgctggcgtagcgttgccagcagggcttcgccaagcagcggtttcatctcagtcagataccagttgattaaataaccggtattgctccagataagtttcgcgttgatgtcgccagtcgcctccagcgcctgaatgaccggctgtagtgcggagactattagcgtttccattcgttcttccggggaacgctccgttgccaggttatcctgatgcacatcaagccagaaacacgcggcgcgcccggtttcatgaaattcaacgtgaatatgttctgccgagacattgatagcgcgcgcttgcgtcagtaatgccagcatcagcggcggcgtcatcagcccgatataccattgcgcccatagggagagtaacggcttattttcacgtggcaggcctggcgtgtgccgatagatgtgatcggaataggcggccagcaatgaacgaaacgtcgcggggcgcgtccactgggcaagagtcatcgccgctggcggcggcgtttcatccagccggatgaagtccaacaggtgcttacgggtagaggcgatcgtctcgcgtactgcgtccgccagcgaggcgtcttccggctggggagcagctcgccagataatatcgtcagcaatcggtgcggaacggtaggccatagcgcagtttaatgatgttaatctaaatgataatgattgctaatcctatcgatagcgataaacgatggcaagcggtttatggttaacgctgttggcgtagcacgattacgccaacaggattcatagggcgcgcatgtcgtcgctgaccagaatgtggttacgtccaagatgcttggcttcgtagagcgctttatccgctttttcgatagcgtctccgatattgcgatccgtcaggggcgcaatgccgatactgacagtgacattggtggcgacgctttcgttaaacatatgcgggattttaagatcgtatacttcctgtcggatacgttctgcggtagcgcgggcttgctgtggttcggcggtggtcagcaacaccagaaattcttccccgccaaaacggcagacgacatcgcgcgatcgcacggcgtcccgaattgccgctgagacgcgaattaacgcctgatcgcccatcatatgaccgtagtgatcgttatacgctttgaaatgatcgatatccaatagcaggacgtagtgttcatggctgcccggcgcctgtaacgtatccagccgattttgcaggccacggcggttatataagccggttaatggatcaagcatactcaggccattgagggtttcccgctcggccagcagcttaaacatgagctgttgggcaaaattatcgtagcgtttctggataacatgttgaatagcgattcccaccattggcagggccagcaaatagagaattcgcaaaccttgttcattaccgttcagccacaggcagaccgcgactggcggtagcgaatagagcgtaaacgcgacgatattcgcggcaaaggctatcgagccgataaacagaacgctaagcagggaaatcagtaaaaaagagaaatcataatggcctaacgccggatactttagcgcaatatgcgccgcccatattcccccaaagagtagggagataaaggggagattaattcttttttgtccatatttcccatgccatatcaacagtaatacgctcaggaccactatcccgatcattggcgtgcaaaatacattgatctgataaagggggaaaacgagagtaaatagcgccgacacggcgttgagaaacaagaaaagacgtaaagaaaactgatacttcttaatacgaagcgaccgccaggatggtgttgtcatgggtaattgtcgttatttatcggtgatatacacggaatcgggcgccaacatgaaaataacgtatgagaaaaggtcgcctaaagcgaggtgttgttgtttttacgttaacagtcggacaatttatcaccttactgaatacgtgtcatcaaccgttaagtaaaactcatctctttagctttctccctggctgacaaatgagaaaatatatcatatgatattggttatcattatcaattccagaggtgaaaccatgttgcagcggacgttaggcagcggatggggcgtattattgcctggagtgattatcgttggactggcgtttatcggcctgtcagctgatgcgctgaagctgttgattgtatcaggattgctactgtctgcgctgatgttgtatcacaaacaattacggcattttgtactgctgccatcgtgtatagcgcttattggcggcatgatgttggcaatgatgaactggaatcagggatgaaaatgaagagacaaaggaaggataagataattggtgcgaggggggggacttgaacccccacgtccgtaaggacactaacacctgaagctagcgcgtctaccaattccgccaccttcgcacagttatcttactttttgatatcgcctcgttggtgcgaggggggggacttgaacccccacgtccgtaagaacactaacacctgaagctagcgcgtctaccaattccgccaccttcgcccagtgcgagcaatatcaacgtggttttggtgcgaggggggggacttgaacccccacgtccgtaaggacactaacacctgaagctagcgcgtctaccaattccgccaccttcgcataccatcgattcttgaaaagaatcactaccacggaggcgcattctagtggttttcagctattcgtcaatagttaattgcatgggatagattgattgctgcaaaaatggacgcgagacgtaggttggataagacgctttgcgtcgccatccggcacatgcaaccagatggcgctgcgcttatcaggccaactatttcttcgcctgacgggtcatcacggtacgataaaccttaaagcgcccggtttgcgcgatgacttcatggaagccaaaagtctcatccagaatcttaggatagggcagaaaggcgttcgccacgatgcgtaactctccgccgctgttcagatggcgcactgcgccgcgaatgagcgtttgcgccgcatcgaggctggtttgcattccgtcgtggaacggcgggttggagatgatcatgtcaaaacgtcctttgacttccgaaaagacgttgctggcgaatacctcgccttcaagaccattagcggcaagcgtggcgcggctggcttccaccgccggagcgctgacatcacacagcgtcaggcgcactttcggcgaatggctggccagcgcggcggaaagcacgccagcgccgcagccgacatccagcactttacctttggtgtgcggcgtcagcgtagacagcagcagttggctaccaacatccagtccgtcgcggctgaatacgcccggcaacgttttgatggtcagcccgtcgatgttgtactcggcccaccaggattcaagactaaactgcggctgcttttccagacggccatggtaaaggccgcaacgtcgcgcgctatctactttgttcagcggcgcatagtccgccagcatcggttcggcgctacgcacgccgctgcggttttctcccacgacgaaaacatcgacgcccgacggcatcagcgacaaaatattcatcaactggaactgcgcttcgggtttatttttcggccagtagtagatcagcgtatcgcagtcagcgacatcgctggcttgcgcgaccaggctaaaacggacgttatcgcccatctggcggcttaatacctgccagtggtgaaactgttgcgtatgcgcgcggctggcggcgcattcaaagcgcgcgggcaggtcatcctgcaaatctccggcaaaaagaatacggctttgttcgaaatcatcactgtggcgcagcaagacttcacttgccggggtaaaagcagacatggaatgctccttaattcagactggcggcgattatagtagtttgatggcgcagattcgacagatttgctatatttgcgcccctgattacaggagcgtttcgctatgacatcccgacgagactggcagttacagcaactgggtattacgcagtgggcgctgcgacgtcctggcgcgctacagggcgagattgcgatttcccttcccgcgcacgttcgtctgatcgtggttgcagaggaattacctgcgctgaacgagccgctaatgcgcgatatcttacgcgcgttgaccgtgagtcccgatcaggttttaccgctgacgcctgagcgcgtcgccatgctgccgcagggcagccgttgtaatagctggcggttaggaactgacgcgccgctccaactcgaaggcgctcaggtcacgacgccggcgtttaatgaactccgggcaaacccggcggcacgcgccgcactatggcaacaaatctgcgaacatgaacacgatttctatcctcagcacgaccgatctccccgcagcctggcagattgagcaacgcgctcatgcgtttccgtggagcgaaaaaacgtttttcggcaaccagggcgaacggtatctcaaccttaagctgaccgctgatgacagaatggccgcgtttgccattacacaggtggtgctggacgaagcgacgctgttcaatatcgccgtcgatccggattttcagcgtcgggggctggggcgtatgctgcttgagcatctgattgatgaactggaaacgcgcggtgttgtaacgctatggctggaggtacgcgcctctaacgctgccgccatcgcgctgtatgaaagtctggggtttaacgaggcgacgattcgccgcaattactatcccacggcacaagggcatgaggacgccatcatcatggcgttaccgataagcatgtaataaaagaggcaaggtgtaatgatgaagtgggactggattttctttgatgccgatgaaacgctgtttacgtttgattctttcaccggcttacagcggatgttccttgactatagcgtcacctttaccgctgaggatttccaggattaccaggccgtgaataagccgctatgggtggattatcagaacggcgcgattacctcattacaattgcagcacgcgcgctttcaaagttgggctgaacggctaaacgttgcgccggggctgctgaatgacgcttttattagtgcgatggcggagatctgttctcctttgccgggcgccgtttcgctacttaatgcgattcgcgggcaggctaaaatcggtattattactaatggttttaccgcgctacaacaaactcgtctggagcgcaccgggctgcgcgagtatttcgatctgctggtgatttccgagcaggttggcgtcgcgaagcccgatccgaaaatctttaactacgccctggagcaggcagggaatcctgaccgctcgcgcgtattaatggttggcgataccgcggaatccgatattcttggcggcattaacgccggactgtcgacctgctggcttaacgcgcatcatcgcgagcagcccgcgggtatccatccaacctggactgtggcgtcattaagcgaactggagcagctcctgtgtaaacactgattgcctcccccaggttgatgggtaaaatagccgcatttttcgtattcaacatgcgtggtcaaacgccgcgcttactcaagaagatttgactatgacgttgtctccttatttgcaagaggtggccaaacgccgcacttttgccattatttctcacccggacgccggtaaaaccaccattaccgaaaaagtgttgctgttcggacaggcgattcagaccgccggtacggtaaaaggccgtggctccagccaacatgcaaaatctgactggatggagatggaaaaacagcgtggtatctctatcactacctcggtgatgcagttcccgtatcacgactgtctggtgaatctgctggacaccccggggcacgaagacttctccgaagatacctaccgtaccctgacggcggtggactgttgcctgatggtgatcgacgccgcaaaaggcgttgaagacaggacccgtaagctgatggaagttacccgtctgcgtgatacgccgatcctgacctttatgaacaaactcgaccgtgacatccgcgacccgatggagctgctggatgaagtcgagaacgagctgaaaatcggctgcgcgccgatcacctggccgattggctgcggcaagctgtttaagggcgtttatcacctttataaagatgaaacttatctgtatcagaccggtaagggccacaccattcaggaagtgcgcatcgttaaagggctgaataacccggatctggacgccgccgtcggtgaagacctggcgcaacagctgcgcgacgagctggaactggtgcagggcgcgtctaacgagtttgatgaagagctattcctggcaggggaaattaccccggtatttttcggtaccgcgctgggtaactttggcgttgaccatatgctggatggtttagtggcgtgggcgcccgcgccgatgccgcgtcaaaccgatacccgcacagtggaagcctcggaagagaaattcaccggttttgtctttaaaattcaggccaatatggacccgaaacaccgcgaccgcgtggcgtttatgcgcgtggtttccggtaagtatgagaagggcatgaagctacgccaggtccgtaccggcaaagatgtggtgatttccgacgcgttaacttttatggcgggcgaccgttcgcacgttgaagaagcgtacccgggcgatattttgggtctgcataaccacggcaccattcagatcggcgataccttcactcagggcgagatgatgaagtttaccggtatcccgaactttgcgccggaactgttccgtcgtattcgcctgaaagatccgctcaagcagaagcagctactgaaagggctggtgcagctttctgaagagggggcggtgcaggtattccgtcccatctccaacaacgatctgattgttggcgccgtgggcgttttgcagtttgacgttgttgtcgcgcgcctgaaaagcgaatacaacgttgaggcgatttatgaatccgtcaacgtggcgacggcgcgctgggtggaaagcgccgatgcgaagaaattcgaagagtttaagcgtaagaatgaaacgcagctggcgctggatggcggcgacaaccttacctatatcgcccccacgatggttaacctgaacctgacccaggaacgttaccctgacgttcagttccgtaaaacgcgcgaacactgatccctttccgggcgcggcatccgccgcgccttcgtactttccctgcctttttaaccgcttacggaatgttcttaaatcccgcgttttttctccgatccgcctgttttttatacgcaccgacaagcgattttaaaattgtgatctatatttaacaaagtgatgacataaatgtcggctttaatgcctgttcaatgcgtgaatatgagagcttaaagctgagatttgtttcagtcacgatattaataactgaaacggaagggtggcaggcgacgcgtcgttacaaattcacgaatgtgatgccagtcattgacttcagaaaccggtgagtttcaccgcattcagcaatgcaacctcgtgttgcctgagctcaaattacgagcaaactatacaggacaaaatcgatgactatgacaagactgaagatttctaaaactctgctggccgtaatgttgacctctgctgttgcgacaggttctgcctttgcagaaaacgcaacaacggacaaggcgcaaagcggaaccgaaaccgcagggcaaaaagtcgatagctctatgaataaagtcggtaacttcatggatgacagcgccatcactgcgaaagtaaaagctgcgctggtagaccatgacaatattaaaagcaccgatatttctgtcgaaaccaatcagaaagttgtcaccctgagcggctttgtagaaagccaggcgcaggctgaagccgccgtgaaagtggcgaaaggcgtagaaggcgtgacctccgttagcgacaaacttcacgttcgcgacaataaagaaggttccgtgaaaggttatgccggcgatacggccacgaccagtgaagtcaaagccaagttgctggcggacgatctcgtcccttcccgtaaagtgaaagtggaaacgaccgatggcgtcgtacagctctccggtaccgttgaaactcaggaacaaagcgaccgcgctgaaagcatcgcgaaagccgttgatggcgtaaaaagtgttaaaaacgatctgaaagttcagtaattcgtcgtaattcgtcctcccgacgtttgtcgggaggcgtaatgtgcaccacactaaaaatatcgcgaatgagtagcctgagcgctcatatttagcggtcgacattaactatggtaaaggagaggcttatgtttcgttggggcattatatttctggttatcgcgttaattgccgccgcattgggttttggtggactggctggtacggctgccggcgcggcgaaaatcgtcttcgtcgtcgggatcgtgctcttcctggtcagcctgttcatgggccgtaaacgaccctagcaggcatctgtaaagatatattgctatcaagccagtccagcggactggcttttacggttttagccgttaacgttttgcgttaccttgtcagcctggaaaaaaatgaaaaacaggaaggcagaggtgggccagcgaataccggttacgctcggcaatattgcgccgttatcattaacaccgttccggccaggccgtatggcgctggtctgtgagggcggggggcagcggggcatctttaccgcaggcgtgctggatgagtttatgcatgcgcagtttaatcctttccatctctacttcggcacatcagccggtgcgcaaaatctctcggcgtatctctgcaaccagcccggctacgggcgcaaagtcattatgcgctataccaccaggcgcgaattttttgatccgctgcgatttgtacgcggaggaaaccttattgacctcgactggctggtggaatccaccgccgcccggatgccgctgcagatggataccgcagcgcgcctgttcgacagcggaaaatccttttatatgtgcgcctgccggggggatgattacacgccgggctatttctcgccgacaaaacaaaactggcttgatatcattcgcgcctccagcgccataccgggtttctaccgtaccggcgttacgttagagggcatcaactatctggacggtggcattagcgacgccattccggttcaggaggcggcaaagcggggggcgaaaaccattgtggtgatccgcaccgtaccctcgcaaatgtattacacgccgcagtggtttaagcgtatggagcgctggctgggagagagcagtctacagccgttggtcaacctggtgcagcatcatgaaacgtcctacagcgcgatccaacaatttattgaaaagccgccgggtaagctgcggatcattgaaatttatccgccgaaaccgctgcacagcatggcgctgggcagccgtatcccggcgctgcgtgaggattacaaaaccgggcgattatgcgggcgttatttccttgccaccgttggtaaattgctcgccgcaacgccgcctctcttgcgccatacgtcgcggattgccgtgccggaaacggtggtcgtgcctccggcgccggtggccaatgatacgcatgtggcggaggtcattagcgcgccgcaggcaaacgacaccacatttaccgacgaggatctggcgtgagctggcgctttatcgatacacactgccattttgatttcccgccctttacgggcgatgagcgcgccagtattcagcgtgcctgtgaggcgggcgttgaaaaaatcatcgtgccggcgaccgaggcggcgcactttccccgcgtgctggcgctggcggcgcgtttcccgtcgctttatgctgcgctgggattgcaccccattgtgattgagcgtcatgccgatgacgattctgataagctgcaacaagcgctggcgcagcaacagaacgtcgtggcggtaggcgagatcgggctcgatctttatcgcgacgacccgcagttcgccaggcaagagcgatttttagacgcgcaactgcaactggcaaaacgctacgatctgccggtgatcctgcactcgcggcgcacgcatgacaaactggcgatgcacttaaagcgccaggatctgccgcgaaccggtgtggtgcatggttttgccggcagtctgcagcaggccgaacgctttgtgcgactgggctataaaatcggcgtcggcggcaccatcacctatccgcgcgccagtaaaacccgtgatgttatggcgcgcttgccgctggacgcgctgttgctggagaccgatgcgccggatatgccgctaaaggggtttcaggggcagccgaaccgcccggagcaggcggcgcgcgtatttgatgcgctctgcgaattacgtccggagcccgcagaggtgatagccgatacgctgtatcgcaataccattaccttgtttcggctctgatggcatcgcagccgccgtccggcaggcgacgcttacaaatatagcgccggcaaaatcagcttcgccaccccacgcgcgcgcaatccgtcagccagccgttccacctcttgcggcgtcgcgcctggccaggctttcgcttcgccatagacaccgtgcgcatgaaaggcattcaaacgcaccggaacctcgcccagcgaagtaataaacgccgccagtgaatcgatatgcgccgcatagtccacctgacccgggataaccagcaaccgcagctccgccagttttccccgcgcagcaagaaagcggatactgtgcttaatatgcgtgttatcacgtccggtcagacggtgatgacactcgctcttccaggctttcagatcgagcattacgccgtcgcaaaccggcagtagtttttgccagccggtctcgcttaactgaccattactgtccaccagacaggtcagccgttgtaactgcggatcggctttgatcgccgtaaatagcgccacaataaacggtaattgcgtggtcgcctctccgccgctgacggtaataccttcaataaacagcgatgctttacgaatatgacgcagcacatcgtcaacgctcatggtctgcgccattggcgttgcctgctgtgggcacattttcaggcaggtatcgcactgctcgcagacgtccgaccgccataccactttcccgccatcaatgctgagggcgtggtgcggacactgcgatacgcattccccgcagtcgttacagcgtcccatcgtccacgggttatggcaattcttgcagcgcaaattgcagccctgtaagaataatgccaggcggctgcctggcccatcgacgcaggaaaacgcaatgatcttactgactaaagcgcatctgttgttcatggctgactacgcgtggctgtcgttccaggatgcgggtattacgtgcggcttcttctcccagccaggtggtattcgtgcgcgagccttcggcgcgaaatttcgccagatccgacaggcgcaccatataaccggtgacgcgcaccagatcgttgccgctgacattggcagtaaattcccgcatcccggctttgaacgcgccaagacaaagctgaaccagcgcctgcggattacgcttgatggtttcgtccagcgtcagaatgtcgctgatcccggcatggtaaaaggcatggtgcggcgcgacggtttgcaaatgggtgatagggtccggttcatcgccatacggcagacgcgcgcccggcgtagtgccaatatcggaactgatgccagactgggcatggagcagcgcccgttgcttccagccatacttcactggcgtattttcgacgaaatccgccagttgggcgctgatacggtagcccagctcgttcgccgtatcattcttgccgtaacgggcggtcaggcccgcgttttcgcacagcagattcacggcttccgccagcccgtacataccgaacatcggcgcaaaacgttcgggctcgatcaaaccttcctgtacaagaaagctattctcaaagaaatgtgatttttcatagaggaattcacatcgtgaattaatgatggcgatctgctgtcggcagtagtgcggtagcgtacgtgaaaagaagtcatcgacagacgtactgcgttctgccacggctttcaggttgagacgtaccagcgtactgccgccgccgccaagcggtagcgagttataacaactgacgatgccataatggccttttgtgaaaattttatcatttacagggccattggaaatgtgtggcttactgcattcacaaatgtttttggcgacctccagcagcagatcgtccggcgtaatttccgcatcgtagataaacgtcaggttaggcgccacctgctttagctcggcatcggcgcgcaaaatcgctcgtgtgacaggcgtatcggcagggccaatattggcatgcataaaggcgtctggcagcgttctgtcgagataacgccagaaacgttttattcgaatatcgatcgcatcttgtgttagaattctaacatacggttgcagcaacgcatcaagctggccgagataaaccggcatggacgtcacggaaggaacgtgatgatacagaatggtgagtagggataacgcatcatccagatctttcgcgccttccagttccagccactgtgaaccgttagccagaaatcgggcgtaatcgggcaacacgtagcgcggtttgaagggggcgtgcccctcaaacatatcgcaaatgacgccttcatccagcgcctggcgggcatcttccggcagggtgggataaggcagggcgttttcagcttccagcgccagaaaatggcgtttttgttcaggcgtgagcaccgggctggtcacaatttgctggcaacgctgctggagcgcagtttcgcatgaggcaggcatcttcgtttcctctttatgccgggacgatgcgctattgtagaaaatggcggcaaaccgactttgatcctgatgcgcttatcgctcgaagaacagacggtgacggcgggataatttgattcagatctcattacagtaatgcaaatttgtacgtagttttcattaactgtgatgtatatcgaagtgtaatcgcgagtgaatgttagaatattaacagactcgcaaggtgaaattttatacggcaatgccgttggagaatgtcatgactgatttaaaagcaagcagcctgcgtgcgctcaaactgatggatctgaccactctgaacgatgacgacaccaatgaaaaagtgatcgcgttgtgtcatcaggcaaaaactccggtcgggaatacggcggcgatttgtatttacccgcgttttatcccgattgcgcgtaaaactctgaaagaacaaggtacgccggacatccgcattgcaacggtgactaacttcccgcatggcaatgatgacatcgatattgcgctggcggaaacccgtgcggcgatcgcctacggcgctgacgaagtggacgtggtattcccgtaccgcgcgttgatcgccggtaacgagcaggtgggttttgacctggtaaaagcctgtaaagacgcttgtgccgcagcgaacgtattgctgaaagtgattatcgaaaccggcgagctgaaagaagaggcgctgattcgtaaagcctctgaaatctccattaaagccggtgcggatttcatcaaaacctctaccggtaaagtgccggtaaacgctacgccggaaagcgcgcgcatcatgatggaagtgatccgcgacatgggcgtttccaaaaccgttggcttcaaaccggcgggcggcgtacgtacggcggaagacgcgcagaaattcctcgcgattgcagacgaactgtttggcgctgactgggcagattctcgtcactaccgctttggcgcatccagcctgctggcaagcctgctgaaagcgctgggtcacggcgacggtaagagcgccagcagctactaagctctgatttgccggatggcgctgcgcttatccggcctacaaatccaggcctgtaggccggataaggcgttagccgccatccggcgatgtaagccttctactcttttccctcaggagggtaccgtgtttctcgcacaagaaattattcgtaaaaagcgtgatggtcatgcgttgagtgacgaagaaattcgtttctttattaatggtattcgtgacaatactatctctgaagggcagattgccgccctggcgatgaccatcttcttccacgatatgaccatgccggagcgtgtttcgctgaccatggcgatgcgggattccggtactgtccttgactggaaaagcctgaatctcaatggcccgattgtcgataagcattcgaccggcggcgtaggggacgtgacgtctctgatgttggggccaatggtagcggcctgcggcggttatgtgccgatgatctccggtcgcggcctcggacataccggcggtacgctcgacaaactggaagcgatcccgggcttcgatatcttcccggacgacaaccgtttccgcgaaattattcaagacgtgggtgtggcgattattgggcaaaccagctcgcttgcaccggcggacaaacgtttttacgccacccgcgatattaccgcgacggtggactctattccgctgatcaccggctccatcctcgccaagaaactggccgaagggcttgatgcgctggtaatggacgtaaaagtcggcagcggcgcgtttatgccaacctatgaactttctgaagcccttgctgaagcgattgtcggcgtggcaaatggcgcgggagttcgcactacggcgttgttaaccgatatgaaccaggtgctggcttcaagcgccggtaacgcggtggaagtgcgtgaagccgtgcagttcctgaccggtgaataccgcaatccgcgcttgtttgacgtcactatggcgctatgcgtggagatgctgatctccggccagctggcgaaagacgacgccgaagcgcgtgccaaactgcaggcggtgctggataacggtaaagcggcagaagtctttggtcgtatggtggccgcgcagaaagggccaagcgatttcgttgagaactacgataaatacttgccgaccgccatgttgagcaaagcggtatatgctgataccgaagggtttatcagcgcaatggatacgcgtgcgctggggatggcggtcgtctcgatgggcggcggccgtcgtcaggcgtctgacaccattgattacagcgttggctttaccgacatggcccgtctgggcgacagcatcgacgggcagcgcccgctggcggtgattcatgccaaagacgaagccagttggcaggaagcggcgaaggccgtcaaagcggcaattatccttgacgataaagcgccagcaagcacaccttcggtctatcgtcgaattactgaatagttgtatactgatctgatcaattatttttgaagcactaagtacggagaagatatgaaacgtgcatttattatggtgctggactcattcggcatcggcgctactgaagacgcggatcgttttggcgacgtaggttccgacactctgggccacatcgcagaagcttgcgccaaaggcgaagctgacaatggccgtaaaggcccgttgaatctgcctaacctgactcgtctggggctggtgaaagcgcatgaaggctctaccggtaaaattgccgccggcatggacggcaacgcggacgttattggcgcatacgcatgggcgcacgaactgtcctccggcaaagatacgccgtccggccactgggaaatcgccggcgtgccggtgctgttcgactggggctatttcagcgatcacgaaaacagcttcccgcaggaactgctggataagctggtgaaacgcgctaacctgccgggctacctcggtaactgccactcttccggtacggtcattctggaccagctcggcgaagagcacatgaaaaccggcaagccgattttctacacctccgctgactccgtgttccagattgcctgccacgaagagacctttggcctggataaactctacgagctgtgcgaaatcgcccgtgaagagctgaccgaaggcggctacaacattggccgcgtgatcgcgcgtccgtttatcggcgacaaggccggtaacttccagcgtaccggtaaccgtcacgacctggccgtagaaccgccagcgccgactgtgctgcagaaactggtcgatgaaaaacagggccacgtggtgtccgtcggtaagattgccgacatctacgccaactgcggcatcactaagaaagtgaaagcgaccggtctggacgcgctgttcgacgcgaccctcaaagagatgaaagaagcgggcgataaaaccatcgtcttcactaacttcgtcgacttcgactcttcctggggccaccgtcgcgacatcgcgggctacgccgcaggcctggagctgtttgaccgccgtctgccggagctgatggagctggtgggggaagatgacattctgatcctgaccgctgaccacggctgtgacccgagctggaccggtactgaccatacccgtgagcacattccggtgctgatctacggtccgaaagtcaaaccgggctctttaggtcaccgtgaaaccttcgcggatatcggccagacgctggcgacctactttggtacatcgccgatggactacggtaaaaacatgctgtgatacctgttgtctttcgcgctgtagatgcgttgacttcattcgctcaccccggtcacatagttaatctatgctcccggggattcacgaattcgtcgccttcctacaacgcgaaatacttagggtatttcactgttttgacacacgttttgtaggcctgataaggcgtagccgccatcaggcaataacaacaaatttaaagggaactgaagatggcaactccacatattaatgcagaaatgggtgatttcgctgacgtcgtattgatgccgggcgacccgctgcgcgcgaagcacattgctgagactttcctcgaaaatgttcgcgaagtgaacaacgttcgcggcatgttaggtttcaccgggacttacaaaggccgtaagatctccgtgatgggccacggtatgggtatcccgtcctgctccatctacaccaaagagctgatcaccgatttcggcgtgaagaaaatcattcgcgtcggctcctgcggcgctgtgcgcatggacgtcaaactgcgcgacgtggtgatcggtatgggtgcctgcaccgactccaaagtgaaccgtatccgttttaaagatcatgacttcgcggctatcgctgacttcgacatggtgcgtaacgcagttgatgcggcaaaagcgctgggcgttgacgcgcgcgtaggcaacctgttctccgctgacctgttctactctccggacggcgaaatgttcgacgtgatggaaaaatacggcgtactgggcgtagagatggaagcggcgggtatctacggcgttgcggctgaatttggcgcgaaagcgctgaccatctgcaccgtatctgaccatatccgtacccacgagcagaccactgccgctgaacgtcagacgaccttcaacgacatgatcaaaatcgcactggaatccgtactgctgggcgataaagagtaagattgtgaagggggccagagcaggcccccttcatcgtttatttcgtcagcacttcccactgtaaattgctttctagcatgaccgtatcggtagcatgcgtaaattgattatcgttcaagacaggtgttaatgtcagcgtgacgttcatcattttcccactgacctgctggttattatccatcgcgatgataccgttgttattatgtagcaacagactatccagggcactgtcattgggagcaaagctcactctatcaagggtgctggcaataggataacttttaccatctactatcatctgactaacacgtacggcgagaccaccgttatttccaaaataaaatcgtcccttttcccccgctgaggcctgcacaaaaagagcaatattctggctttctgggcaactcacactaacgtgaacctcctgtgaagacatttgattccagccttgctgagaattgacgatatcatcttgcttaagccagccaaagctgacgtttggcgaagaaaacgttatttggcagtcatcgtcggcccgggctgatggggggagtagtgcggtgaagatacaacatatagcaatccccaaccatttgctgttggatttcattgacagactccctttgccgtttcataaaatgcctctttatcctgggttttctgcagcgtgtagtggatgcgacacagacgattcatatcatcatcagcggcatataacgcaggattatccccaacatcggtgataaatacgcgtccgctgtcgacagcgctgaccaaatagttatttttttcatctacaatgctggtgcctttaggtagccatgagccatccggacgctttactgccagcatcacacggcgtgtattcagcacgttgaaatccagtacccgaaaagcgctgtgcgcgacggtaatattcttaataccgtttgccagttccatactctttggtagcgtattcgcattaacctctacgcgggatttccgccattcagttagccccggaatgacggcttgcccccagtggtcagtccagattcgcccctgtggcgtggcgatttcaatgccgctttctggttcactcaggcgtgcgatagcaaaggtatttttgattgtataaggcgagaacgttatgccatgttcgtgtgcagcgatgcctccgctgaaggttgcgttatagttgcggtaattatcgccatcagtgccgccgcccacgctgagttgagtgtaatgaagattgctattgagattaccgttgaagctattttgctggttttttgcatcacgatccgcagaaatatagtaatgggtatctttactcagcgaaccattattttgtagcccgtaggttgttttatcaccttgattacgcatataagcgccgacgcgctgctcacctagtggaatgctgatgttgatgtaaaacatatcatcatcattactgtcgttatgattctcatcatcctgattaacagcgtgctgccagttagcggtaattgaggcatatttaaacgttttgccccaggaagccattatactgcgagagtcgttgtcattatccgtagcctgataagtgtaataacccagagagaaggtacctaacagattatggttccaggcaatattagcactggagctactttgatattcgtaagcatctttattgagcgcatccgttaactcacgatatccgtcgctgtagcgggcggtactgacgtcaagtctaatttccccgggcagcgccatgctggcgcgtagttcacttttcgcaccctgcagagattcgccaaaggacgctttactgcccagcattgagccggaaaacgtccatttattggttggaagccattgcagcatccctcctgccgcttgatagtcttgtgccagtacgccagacgcctgcgccagccagttttcactcagtttccaaccatcgctgatgttatagatccaggggagcgaatagtcgctggtggtatcacgtatgcgccctatggacattgttaagcctgcgggcgtgagttcgcgtaaattaaaggatactgccggcaccgtgaaggttgtcgttgagccatcggtttcaacgacgctgacgttaaggtcggtattgctgcgtatgatggggacattttcaagggtaaatgccccagcgttcactggtgcggtataaataatctgtccggactgacgaacttcaacgcgagcctggtgggttcgggcaataccgttaatggttacgccttgtgtatcctgtgccagcccttgttcagggataagctgtacgccgttgatcggcgcgccactgaatagactggagttgacgttgatctgcccaacttgcgcacgcattttttgtgcctgaaatacgtgctccgcataggtatatagactatcggtacggtattctccatcattattcgtcagcatgtagcggctgcgcagcgtccattccgcgaagtttaagccagcttcaaggtttgcctgggcatagtttcggctatcgctaccggatgactcgctgcgactggcgtacaggttatagttaaataacccggcggtgccgcctttaatcacgttgtttagcgatagtaagttattatccagagcctgtgccggaacaaaaagctccagcgattcactgtttggcagtggggtaataatcgctgagggataatcttcttgtaggctatggcaggtttctttggcgctgatattaagcgaaacgagcccgctggcgctgaggaaatcgtcatccacgcaaagctggccttctgtgtcgaaacgcgcgaccaacgaccctctatttacgccattgatctttaccatgacggtgtggctgcctggtagaaagcgcggcgcgcgggaaaaatattgtgcgacgttggggctaatgcctctggaggtgagaatacccatgtcaaaattcagctcctccgccagagctgaaaacgtcgtggttgccagtgagcaataaagcgcagttttgatgtatagcggcagttttaaatacttcacgtgctagctctcattacggcaccagcggtgaggtaaagctggggacttcaatgccgtaacggctggcaggataaaaacgtacggatgtatcagcagcaaagggcgtttttatactgacgttcaatgtttcgccgggcagaatataggtttttttaatcgtgccttcgcccccggaaggtaagaaggtaatattttgggctaaacgtacaacgtagggagacggatttttgacgttgattgtttgtccgtttctggaccaggttaataatttccaggcatcagtaacgaccggtagatttttaggacgaattaataccggcaaatcctggcgtagattaaaacctattttcattcctttatcggtagatttcggaggaataccttcaaacgtgacgcgcttatagtgctcgacggtgagcggttccgtactttccataataaagcgtagttgctgctgctggcctgcttcaacgcgaacaactggttgagtgacatccagtttcacaccattgtcgtcaggtaaatcaacgacggtggtatataacaaagccggattgctgtcggtgtttttaacattcattacgccgctgtgtgtggattcttcaatcaccagtagcgtagtttccggtaccatgccggcagcgttagcctgtgaaaagagtgttgaaaaaacaaaggggacgctgagtaataataatggaagtttagtcactgctggcatcagaattagtcctttaattttaatctgtctccccataataagggagacagatcaataacctttttacacggtctggatcagagatatttaagcgtgatggttgcctgaccatccagatcagtatcatcagtaatggccagcgttgcagtattctgaatagccagtgaggttttcagcgggaaaatggcgagggtatacggaaccggttcggtggtgccttttgtagcaacggtaaacatttccatattgccgtttttgataatcccggtggaagacttctgccagactgggctatcaacggttcctgagatagcgtcagattttacaccatcagcggtaacgttcgcggtatcggtataaatagagaacgcgccgatttttacaccttcggttgttttgccaacgccgtaggacattgtggtatcagatactatactattagtcatatcgccattggctatggagataacggatgcgcctgggtgggtgtccgcacggtcatcggtaatagtccatgctgctttggttgcagacggacaagagatactcagagagacatctttagtacccagttggtttacatcggttgcggaaagtgtggcgaggcggatagtaccgtaatcaaccacgccgccgccgctgagttctggggtacaaccaccaacaaccagttgaccggtgacttttaatacggcagtagtgtcagcattcacgctggttgtagcaaaggaagctgcaattgcagtaataagcaaaatttttttcattatagttccattaaagaggtgttgaatattccatgtgaatgctggagttacagatatacgagtgtaaaggtcgcctgaccatcaagcgtggtgttatcggtaatagccagtgtgtccgttccctgtatagcggcagctacgcgtataggaaatgttgcggtggtaaaagcaacggggccatttccatcgccgacactatatgtagtgcgggttggaaatgtatttgtaagcgcaacgtattcgtttgatgctaaagcccagacaccaggattcgaatcatttgacgctaccatcttcgtcttaactccatcggcggtcgaattattcgcgtctatggagaggccgtatgcaccaatcttgataccatctgctgttgtacccaggcctagctgatagtttggtattctattgttctgaccgccaaatgttgcgttatcgatagtcagcgttgtcgccgaatcgccatgattgtcggtagcgacccagccaacttttgccggtgcaaggcactgaatcgtgagtgttatatctttgtatcccagttgattcgtctgagttggcagcagatcgctaacggccttagtaccgaaatctacaacgccaccatcacttaactctggtatacatgcgccgttggttaaaacgccagtcagttttaatacagcagtggattcaaccgcttgcgctgaagttgataatcctattatgacagaggtcgctattaataattttttcatcagtaatccctaacgattaagtatatttccaaatgacatgtaatgcgcgggtcgggattctatgaagataatgatatgttgtaaatttaataaaattaaatcttggttaagaaaaactttaatcatcattggtgatgataaatggtttataattcgctgggtttatgaagtgcggggaaataatattaattttaaagaatatagtagttagtgagtgtgttttaactatttgtgctattcactcatttttcagaatatgttgttatgtttaaataatatcagagacacattcgtctctctgatattattcatttagcgcacagcttctgcaatccacgccgacagttcccgcagttctttttcctgctccgggaaatcaaccagtagcgcctcgcacgtttcctgtagtttatccgcgcggtacaaacacccttgcagccgctcggccagcgcttccagcggtgccgggttcaggctatcggtaaatgcctgtgcgcgggtaatcacacctttctcgacgtcaaaatgcagctcgacgccgccccaggtgaaacgctcgtccagcagatggctgaacgctggtgcctggccgaaattccactcccaactgctctggcgcgcaaaggtttcggcaaaattcggcagatccggcgttttatccggtgaaatcacttccgcgtcgacgcgttcgccgtaatgggcgaaaaaggcttccgtgaccgcctggcagacctgttcatgggtgatacccggtaatagctcggtaagattggccacgcgggagcgaacggaggtgattcctttcgccgcaagtttctttttatcgggattcagatagtttgccagacggctgaggtctgcattcagcagcagcgtaccgtgatggaagccgcgatctttggtttcgcgataggctgaaccggagactttgcgatcgccgtccggcgtttttacgaccagatcgttgcgtcccgaagcatcggccatgacccccagcgaattcagcgccgcgagcacaatatgggtggagatggttttatcgtattccggtttaccagccataaaggtaaagcaggtattaccgaggtcatggaataccgcgccgccgccgctgctacggcgggccagacggacattatcttcttccatacgccgcgtattacactctttccacgggttttgcgcgcgtccaatgaccaccgtatccgcgttgcgccacaggaacagcacgcgctgggtggcgggcatctggcggaaaatgcactcctcgaccgccaggttaaaccagggatcgtaagagtcagaaataagcaggcgtaatgttgtcatagtggttttccttacctttattaagccgtcattttactctttttcctcacgctcttcctcttccggaacaggcttgctggccgttagcaggaagggcgactgctgccagcgggtgcgtttaccttgtagcaaggtgcgcgtcagcaccacgcctatcgccagcgagagtagcagcatcaggcgtagaatgttggtggtgttatcgacctgctttgcttcggtggccagcgtgtgggtatccagcgttagacgcaggtagcccaatgggccgtttttcccctggataggctcgacaatttgttggttaaaatagctgcccgcttttttgccatccagcgccagcctgtcgcgcacattgacgctttcgccagcgcgagtaataagatcgccctgttcatcatagacgccggcatccagaatacggctctcttgcgtgagctgacgcagcacggcgttgatgcgattttcatccggtgtttcgctgcgcatcagcggggcgatgttgagcgtcacctggcgcgccagcgtgcgggccagctcttccagctgcgggttgcgctgtcgctggtggttttgactaaaccaggacgcgccctgcataagcgcgacgagcagtgtgagacagaacaatacaatgactgcacgatgcagccgaaatttcagttttgcgcgagccatattccacctgctgaaaatttgaggcttaatgttgccagaagcgatggttacaaggtagcctcatgcgttattttccgcggggcggttaccggcctgaacgatttacaggagctttaatgcctaacattacctggtgcgatctgcctgaagatgtctctttatggcctggtttgcctctttctttaagcggcgacgaggtgatgcctctggattaccatgcaggccgcagcggttggctgctgtatgggcgcgggctggataagcagcgtttaactcaatatcagaccaaactgggcgccgcaatggtgattgtcgccgcctggtgcgtggaggattatcaggtcattcgtctggcggggtcgctgacgccgcgtgcgacgcggctggcgcatgaggcgcagctggatgtcgcgccgctgggtaaaattccgcatctgcgcacgccggggctgctggtgatggatatggattccacggcgatccaaattgagtgtatcgatgaaatcgcgaagctggccggtaccggtgagaaggtggctgaagtgacggagcgcgcgatgcgcggcgagcttgattttaccgccagcctgcgcagccgcgtggcgacgctgaaaggcgcggatgccgatattttgcgacaggtgcgcgggaatctgccgctaatgccaggattaacgcagttggtgctaaaactggaagcgctcggctggaaaatcgctatcgcctccggcggcttcactttcttcgccgactatctgcgtgaccagctacgtctgacggcggcagtcgccaatgaactggagatcatggacggtaaatttaccggccacgttatcggcgatattgtggatgctgagtataaagccaataccttgcttcgtctggcgcaagagcatgacatcccgctggcgcagacggtggcgattggcgacggcgctaacgatctgccaatgatcaaagcggcagggttaggtattgccttccatgccaagccaaaagtaaacgaaaagacggagattacgatccgccacgctgacctgatgggcgtgttttgcattctctccggcagcatgaaccagaaatgattaacctgcccaatggcaaggcgaccgtaggccggataagcgccagcgccatccggcaacagcgttaacgaaagaggtaaaacgtggcaaaagctcccaaacgcgcctttgtttgtaatgaatgtggtgccgattacccacgctggcaggggcaatgcagcgcctgccatgcctggaacaccattaccgaggtgcgccttgccgcgtcgccgacggtggcgcgtaacgaacgtctgagcggatacgccggcagtgcgggcgtatcaaaagtgcagaaactgtctgacatcagtcttgaggaactgccgcgcttttctaccggttttaaagagtttgaccgcgtgctgggcggcggggtggtacccggcagcgccattttgattggcggtaaccccggcgcgggcaaatcaacgttgctgctgcaaacgctgtgcaagctcgccgagcagatgaaaacgctgtacgtcaccggcgaagagtcgctacagcaggtggcgatgcgtgcgcaccgtctcggcctgccgaccgctaatctgaatatgctctccgaaaccagcatcgagcagatctgcctgatagcggaagaagaacagccgaaactgatggtgatcgactctatacaggtgatgcatatggcggatatccagtcgtcgccaggcagcgtcgcccaggtccgcgaaacggcagcctacctgacgcgcttcgccaaaacgcgcggcgtggcgatcgtgatggtcggccacgtcaccaaagacgggtcgctggcggggccgaaagtgctggaacactgtatcgattgctcagtattgctcgacggcgacgctgattctcgtttccgcacgctgcgcagccacaaaaaccgctttggcgcagtcaatgagctgggcgtcttcgccatgaccgaacaggggttgcgcgaagtgagcaatccgtccgccatctttttaagccgtggcgatgaggtcacttccggcagttcagtgatggtcgtctgggaaggcacgcgaccgttgctggtggagattcaggcgctggtcgatcactcgatgatggcgaaccccagacgcgtggcggtcggtctggaacaaaaccgtctggcaatcctgctggcggtgctgcaccgacacggcggtctgcaaatgtcggatcaggacgtcttcgttaacgtggtcggcggcgtgaaagtcaccgaaaccagcgcggatctggctttactgctggcgatggtctccagcctgcgtgacaggccgttgccgcaggatctggtggtgtttggcgaagtggggctggcaggcgagattcgtccggtgccgagcgggcaggagcgtatttccgaggcggcgaaacacggctttcgtcgggcgattgtgcctgccgccaacgtaccgaaaaagccgccggaaggaatgctggtgttcggtgttaaaaagctcgcagatgcgttaagcgtgtttgacgacttataattctctgtatgtagtgatgttgtataatttgccggatggcgatgcaatgcgtcttatccggcctacggattgatacggattgatgttgtaggcctgataagcgaagcgccatcaggcagtgttatgcgatttttccagcaggaggctcttgtgtcatcgttcgactatctcaaaaccgcgattaagcagcaaggttgcactctgcaacaggtggctgacgccagcggtatgaccaagggatatctgagtcagttacttaacgccaaaatcaaaagccccagcgcgcaaaaactggaggcgctacaccgttttctcgggctggagtttccccgccgacagaaaaacattggcgtggtgttcggtaaattttatccattgcataccggacacatctacttgatccagcgcgcctgtagccaggtggatgagttgcacatcattatgggatatgacgatacgcgcgaccgcgggctgtttgaggatagcgccatgtcgcagcagcccaccgtgtcggatcgcctgcgctggttattgcaaaccttcaaataccaaaaaaatattcgcatccacgcctttaatgaagaggggatggagccttatccgcatggctgggacgtctggagcaacggcattaaagcgtttatggcagagaagggaatacagccgagctggatctacacttccgaagaggctgatgcgccgcagtatcttgagcatttagggattgagacggtgctggtcgatcctgaacgcacgtttatgaatatcagtggggcgcaaatccgcgaaaatccgtttcgttactgggaatatattcctaccgaagtgaagccgtttttcgtgcgtaccgtcgcgattctgggcggggaatcaagcggcaagtctacgctggtcaataagctcgccaatatttttaataccaccagcgcctgggaatatggccgcgactatgtcttttcgcatctgggcggcgatgagatggcgttacagtattccgactacgataaaattgcgctgggccatgcgcaatatattgatttcgcagtgaaatatgcgaataaagtggcgtttatcgataccgatttcgtcaccacccaggcattttgcaaaaaatacgaaggacgcgagcatccctttgtccaggcgctgatcgacgagtatcgcttcgacctggtgattttgctggagaataatacgccgtgggtagctgacggactgcgaagcctgggcagttcagtggatcgcaaagcgttccagaacctgctggtcgagatgctgaaagagaacaacattgagttcgttcacgttaaagaggctgattacgatggtcgctttttgcgctgtgtggaactggtgaaagagatgatgggcgagcagggataagaaccaatgcctgatgcgacgcttaccgcgtcttatcaggcctacagtttcacaacgtactggaatcgctgggtttgtaggccgggtaagcgcaagcgccacccggcattcagacatttatttggcaatacgcttgtacttgatacgcttcggctccagcgcctcggcgcccagcgtgcgtttcttgtactcttcgtattcggtaaagttgccttcgaagaattccaccttaccttcatcctgataatccagaatgtgggtggcgatacggtcaaggaaccaacggtcgtgcgagataaccatcgcgcagccagggaactccagcagggcgttttccagcgcgcgcagggtttcgatatccaggtcgttcgtcggttcgtcgagcagcaggacgttgccgcccacctgcagcagcttcgccagatgcaaacgaccgcgctcaccgccggacagttcgccaacgcgtttgccctgatcgacgcctttgaagttgaagcggcctacataggcgcggcttggcatttcagtgttgccgatcttcatgatatccagcccgccggacacttcttcccagacggttttgctgttgtccatcgcgtcgcggaactgatcgaccgaggccagcttgacggtttcacccagcgtaatggtgccgctatcgggctgctcctgaccggacatcatgcggaacagggtcgatttacccgcgccgtttggcccgatgatcccgacgatagcgcctttcggcaccgagaagctcaggtcgtcgatcagtacgcggtcgccgtaggatttacgcaggttgctgacttcaatgactttgtcgcccagacgcggtcctggtggaataaacagttcgttggtttcgttacgtttctgatactcaacgctgttcagttcttcaaagcgagccagacgcgccttacctttcgactgacggcctttcgcgccctgacgcacccactccagctctttctcaatggatttacggcgcgccgcttcggcagacgcttcctgcgccagacgctgatctttctgctccagccaggaggagtagttgccttcccacggaataccttcgccgcggtcaagttccagaatccagccggcgacgttatcgaggaagtaacggtcgtgggtaatcgccacgacggtaccttcgaagtcgtgcaggaaacgttccagccacgcaacagattcggcatccaggtggttggtgggttcgtcgagcagcagcatgtccggcttttccagcaacagacggcacagcgccacgcgacggcgctcgccgccggacagtttttcgactttggcatcccagtccggcagacgcagagcgtcagcagcgcgctcaagctgcacgttcagattatgaccgtcgtgcgcctggataatctcttcaagtcggccctgctctgcggccagcttgtcgaagtcggcatccggatcggcatacagcgcgtacacttcatccagacgtttgagggcgttaaccacttccgaaacggcctcttcaatcgactcgcgtaccgtgtgttccgggtttagctgaggttcctgcggcaggtagccaatcttaatgccgggctgcgggcgcgcttcgccctcgatatctttatcgagccccgccatgatgcgcagcagggtagacttaccggcgccgttaaggcccagcacgccgattttggcgccagggaagaagctcagcgagatgtttttcagaatatgacgtttcggcggaaccactttgccgacacgatgcatggtataaacgaattgagccacgttggacttcgcctctatgtttatcgtgatggtgaatagatgtcaaaggcgaagtgtagcctttttccctgcctaagcccagccagcagatcgcactcgcaataaaagtaaaaaagtgtccgtaacgtggcgcaaatggctatgactggttagcataaattcattacgcggcatgatgctgcattggataacaattgaggaagtgcttgtggatagagccaaaccatttgtctggcgtctcgtcgccgccagcgtatgcctgctgaccttttgtcacctcgcgcgggccgactcactggaagagcagcgtaaccgctatgcgcagattaagcaggcctgggacaaccgccagatggatgtggtagagcagatgatgccgggtctgaaagattatccgctctacccgtatctggaataccgtaagatcaccgacgatttgatgaaccaaccggcgattgctgtcacgcagtttgtgcgcgccaatcctacgcttccgcctgcgcgtacgctgcaatcacgcttcgtcaatgagctggcgcgtcgtgaagactggcgcggcttgctggcgtttagcccggagaaacccggcaccacggaagcgcaatgtaactattactacgcgaaatggagtaccgggcaaacggaagcggcctggcagggcgcgaaagacctttggctgaccggcaaaagtcagccgaatgcctgcgataaactgttcagcgtctggcgggcctccggcaagcaagacccgctggcgtatctggaacgtattcggctggcgatgaaagccggaaatacggggctggttacggtgctggccggacagatgccggcggaatatcaaacgatcgcctcagcgatcattaccctcgctaatgaccctaataacgtgttgatctttgcacgcaccaccggcgccaccgattttacccgccagatggcggaagtcgcgtttgccagcgtcgcccgccaggacgcggaaaatgcgcgtctgatgatcccctcgctggtacaggcgcagaaacttaatgaggaacaaacgcaggcgctgcgcgatatcgttgcctggcgactgatgggcaacgatgtgaccgatgcgcaggcgaaatggcgcgatgacgcgattatgcgctcgcaatcgacgtcgcttatcgagcggcgcgtgcgtatggcgctggggatgggcgatcgtcgcggtctcaatacctggcttgcccgcctgccaatggaggcgaaagagaaagacgagtggcgttactggcaggcggatttattgctggagcgcggtcgtgacgccgaagcgaaagagatccttcatgctttaatgcagaagcgcggtttttatccgatggttgcggcgcagcgtttaggcgaagagtacacgcttaaaatcgataaagcgcccgccaacgtaaacagcgcgttgacgcaggggccggagatggcgcgtgtacgggagctgatgtactggaacctggataacacggcgcgcagcgaatgggcgaatctggtaaaaagccgtagtaaatctgaacaggcgcagttggcgcgctatgcgtttaaccagcactggtgggatctgagcgtacaggcgacgatcgccggaaaactgtgggatcatctggaggagcgtttcccgctggcgtataacgatctttttacccgctatacccgcggaaaagatatctcacaaagctatgccatggcgattgcccgccaggagagcgcctggaacccgaaagtaaaatcgccggtaggggccagcggcttaatgcagattatgccgggaacggccacccatacggtgaaaatgttttcgattccggactaccgcggccccggccaactgctggagccggagaccaacatcaacattggcaccagctatttgcagtatgtctatcagcagtttggtaataaccgtattttcgcctcggcggcgtataacgccgggccggggcgcgtgcgcacctggcttggcaatagcgccgggcgtatcgatgccgtagcgtttgtcgaaagcattcccttttcggaaacgcgcggctacgtgaaaaacgttctggcctatgacgcttactatcgccactttatggggcagaaagaggccttaatgagcgactctgagtggcagcgacggtattaatgcagacgggttatgttatcatttgtactcgtgtaacagtacaaacggcggtataacatgacccagcattccccttattcatcggctatcgccgaacaacgtaatcaggagtggcttcgttttgtggagttactccgtcaggcatatgcagaggatctgcatctgcctttattacaactgatgcttacgccggacgagcgtgaagcgctgggaacgcgcgtgcgcattattgaggagttgttgcgtggcgaaatgagccagcgcgagttgaaaaccgagctgggggcgggcatcgccaccatcacgcgcgggtcaaacagcctgaaatccgcgccggttgaactgcgtcattggcttgagaacgtactgctgaaaaacgcctgatttgctcgtaggccggataaggcgaagcggccatccggcaacatcgccgcgaaatgcctgatggcgctgtgcttatcaggcttacaatatagcgcaaataattatcgatacaccgcgttatgaaacgggctgagcgccaggatcaccgcctggtagtaaacgctggagcgcgttaattttccggcggtaaatacgccaatggcgccctctttacgaccaatctcatcaatacctgtgtactgcgacattaccgggccaagcgcttctccctggcggactctgtcgagaatgacggcgggcagcggtagcgtggccgatcgcgcttcaccgcgctgaacgccgttatcaatcaccacccaactgaaggtggcgtcatcgtcaattccggcttcaatggctacccagaaatcagcttgtggatgcaggcgtcgcgcattatccacgcgatttcgtgcgccagcacgcgtttcctcgcttccgaagggctgctccggtacgccgctctcgacggcgacgggcgtaatatggcacgatccttcgccgaaaatctcttcaaatgcctgtagaattgcctgaattttggcaggattggtggtcgcagagataacctggtgcataattaagctcagttttaaaaatttatcgcagtataacggaaaaaaaacatgttacaggtataccttgttcgccacggtgaaacgcagtggaacgccgagcgacgtattcagggccaatcggacagtcccctgacagcaaaaggcgagcagcaggccatgcaggtaggagaacgcgcccgtagcctcggcatcacccatatcatcagcagcgatttaggccgcacaaaacgcacggcggagattatcgcccaggcgtgcgggtgtgatatcacctttgactcccgcctgcgcgagctggatatgggcgtgctggaaaagcgccagatcgattcgctgacggaagaagaagagggctggcgtcgtcagctggtcaacggcacgcaggatggccgcattcccggcggggaatcgatgcaggagttgagcgatcgcgttcatgccgcgctggcgtcctgtctggagctaccgcagggcagccgacctttattggtcagtcacggtatcgcgttgggctgtctggtcagtactatactgggactacccgcctgggcggaacgccggttacgtttgcgcaactgctctatttcccgcatcgattaccaggaaagtcagtggctggcgtctggctgggtggtagaaaccgcaggggacgtttcgcatctggacgcccctgcattggatgagctacagcgttaacggcgaatcgggatcagaaattcgcagcgcaggttgatagggcgatcgccggttttggtatcttctgacgggtagtatcgctctatatcctgtcctttacgacgggtcagattcagcattggcatacaggtgccgtaaacggtcaggataaaatcctgcacgccggttcctaacccttcataggtgaacatgacgtattcaccaccctgcaacagcacgggatgcgccgactgaacatagccatcggcctgctcttgcggcagtgcggtggtatagaatacttcctgctcatcgtctttctccatgctggggcgcgtttcattaagcccataaagcactggcggaatagttggcgaatgaccgaggaaatcatgccagaattgcacgcgcatttcgtggcggaagtcggaaatctgttccagcgagcaggaatagctctgcgtgacgccaaggagcggcgtatcttccagcgtaacgaactgatgttccggcacggtaaactcgcccagccgtaatggcgggcgaatgccaaaggcgctccattccgaggagcggcgatacagcgctggcgtctgggaaaactgtttcttaaaggcgcgcgtaaaggtttgctgagaatcgaagcggtactgaagagcaatatccagaattggacgcgcggtcaaacgcagcgccactgctgatttcgataaacgacgggcgcggatgtaagcgccaatggcgtggcccgtcacgtccttaaacattctctgcaggtgccacttggaatagcctgcttttgccgccacattgtcaagtgacagcggctgatccagatgaccttccagccagattaacaggtcgcgaattatgccagcctgatccataaaatatccccatcctttcaacaacgagcacccgatatcaggtaagaggataatagcattttttgttcttttagcattcagtgttttttttgagcttaaatgctttttttaggcaacgtgacaggtaattattctaatcctgtgatctataaccattttattttagaatgtctaataattacgcaacgtaacttttatgaatggtaacaatatgaaatacaagagcttagtacttttctcaattttgttgctgctggggcagagcgcccgcgcggaacaaattggttcagtcgatacggtatttaaaatgttcggtcctgaccataaaatcgtggtggaagcttttgacgatcctgatgtcaaaaacgtgacgtgctatgttagccgggcgaaaacgggcggcataaaaggcggattggggctggcggaagatacgtctgacgccgctatctcttgccagcaggtcgggcctattgaactgagcgacaaaattaagaacggcaaggcgcagggagaggtggtgttcaaaaaacgcacctcattgatatttaagtcattgcaggtcgtgcgtttctatgatgagaaacgcaacacgctggcgtatctggcctactccgacaaagtagtcgacgggtcgccgaagaacgccatcagcgcggtgccggtcatgccgtggcgacaataacagggaaagagtatgcagcaaccgcaggtctggttagtcgaggatgaacagggaatcgccgatacgctcatctacaccctgcaactggaagggtttaccgttgagctattcgctcgcgggctgcccgcgctggaaaaagcgcgtcagcaacggccggatgcggtgattctcgatgtgggactaccggatatcagcggctttgagctgtgtcggcagttgctggaacgccatcctgcgctgccgattcttttcctgactgcccgtagcgatgaagtggatcgattgcttggtctggagattggcgcagatgattatgtcgccaagccgttctcgccgcgcgaagtgagcgcccgcgtgcgcacgctgctgcgccgggtgaaaaagtttgctgcgccgtcgccggtggtgcgtaccggacattttgaactcaatgaaccggcggcgcagatcgcctggtttggtacgccgctctcgctgacgcgttatgagtttctgctccttaaaaccctgctgctgtcgccggagcgcgtgtactcgcgccagcaattgatggatattgtctggtctgatgcccaggagaccttcgatcggacggtcgatacacacatcaaaaccctgcgcgctaaactacgcgcgatcaatccggagctctcgccaattaacacgcatcgtggaatgggatacagcctgaggagcgtctgatgcgcatcggaatgcgtttgctgctgggctactttcttattgtcgccgtcgccgccgtgtttgtgctgtctatcttcgttcaggagataaagccgggcgtccgccgcgcgacggaagggacgctgattgacaccgcaacgctgctggcggcgctggcccgcgacgatctcctttccggcaacccgactgacggccagttggcgaaggcattcgcccaactgcaacatcgcccgtttcgcgccaatatcagcgggatcgtcaaagtgcgcaatgaataccatgtctacatgacggatgcgcaggggaaggtgttgtttgattcggaaaacaaagcggtggggcaggattattctcgctggaatgacgtctggcttacgctgcgcggacagtatggcgcccgcagcacggcaaaagatgctgccgatcccaatagcaccgtgatgtacgtagccgcgccgataatcagcgatggacggattatcggcgtcctgactgtcggcaaaccgaatgcggcaatggcgccggtgattaagcgcagcgaacggcgcattctgtgggccagcgccgttttactgggaattgcgctggcgattggcgcggggatggtctggtggattaaccgctccatcgcccggttgacgcgctatgcggattccgtcaccgaaaaccgcccgcttgcgttacctgcattaggcagcagcgagctgcgtaaactggcgcaggcgctggagagtatgcgcattaagctggaaggcaagaatgagattgagcagtatgtgtatgcgttgactcatgagctgaaaagtccgctggcggcgatacgcggcgcggcggagattctgcgtgaaggaccgcccgcggatgtggttacccgctttacagagaatatactggcgcaaaatacgcgaatgcaggcgctggtagaaaccctgctgcgccaggcgcggctggaaaaccgacaggatatccctctcgcgccggttgctgttgatgagctatttacgcagcttagcgaggcgcgcagtattcagttggcggcaaaaaagatcacgcttactctacggccttcctcgctggttgtcgtcgccgacgcggagcttctggcgcaggcgttgggcaatgtgttggacaatgccatcgactttacgcctgaaaatggcgttatcacattaagcgctcagccgatgggggagaaagcgatcctgcaggtgacggattccggctgtggtattcctgattttgcgctgccgcgcattttcgaccgattctattcgttgccccgtgaaaacgggcgtaaaagcagcgggcttgggctggcgtttgtcagcgaggcggcgcggctcctcaacggtgaggtgacgttgtgcaatcgtcccgaaggcggcgtgctggcctcgttgacacttcaccgtcacttcacataacttcaaattctccccacatcgcgttcttacactgctggcattgcaaaggagaacgctatgttgaaatcccccctgttgtggaaaatgattacgttaggcggcgccatgatcctgctgttaattcccctgatgatggtacggcacaccatcgtggagcgtgctgattatcgaagccatgtagaagccgctattcgtcagagtaccagcggcccacaaaaggttgtcggcccgctggtggcgattccggtgacagagctctataccgtgctggaagaggagaaagaggtccagtataagcgcagctatctctatttttggctgccggagtcgctattggttgaaggcaatcaaaacgttgaagcgcgaaaaataggtatttatcaggggcaggtgtggcataccgatatggcgataaaggcggagtttgatgtggcccgtctgcatgagctgaacagaccgaacattacccttggaaagccctttatcgtcgtgggcgtcggcgatgcgcgcggtatcagcgcagtaaaagcgccgcaggtgaatggtgaaacgctcactgtagagccggggaccggcttaccggaaagtagagagggcattcatatcccgctgccggacagtcagtgggcgacgcgcaacctgacgttggatatgtcgctaaatttaagcggaaccggcagcttttcactggttcccgtcgggcgtagcagtgaaatgaccctggccagtaactggccgcacccaaattttgtgggggattttcttcccggtaaacgcgaaatcagcggttcaggatttcaggcccagtggcaaaccagccggtttgccacgaatctcggcgaacagtttgctgatgcgcaaaaggtggattgggacaacttaccggcgtttagcgtcgctgtatcgacgccagccgatcagtatcaactgacggacagagcgacgaaatatgccattttgttgattacgctaacgtttatggcgttctttgtcttcgaaaccctgacggggcagcggttacacccgatgcagtatctgctggtggggttatcgctggtgatgttctacctgctgttgctggcactgtcggaacatatcggtttcacgccagcctggatcgccgcaagcctggtgggcgcgttgatgaatagcgtttatttgcaggcggtgctgaaaggatggcgcaatagcgtgctgtttacgttagcgttattggcgctggatggcgtgatgtggggattgctgcgttcggaagatagctcgttgcttctgggtaccggcgttctgctactggcgcttggcggcgtgatgttcctgacgcgccatctggactggtattcgctctcttgtcagcaacgtaagtcattaccgccagtaaaagatgacgaattacgtttgtggaaataaatctaacgggcgcgcgcgttaacgttttcccgcgcagcgccagaaactgtgatgccgttagttataggtcaggtttaatgttgccgtggcattcgcttgcccggccgttaccgtggcggcggttttatagtagcgcgcgctaattttcagggtggtcgacatattcatggttccgccgttaaccgtctggctgccatcggcattggtggtaatcgtgtgagtaaagagatcaattttttgattgattggcaaactgccggtaaagaaaccggcgtccggcgcctgaatacccaactgtacgccaacgccggttgcgctggttggcgcgctcgcattgctcaactggatgactgaattatcagggttatttccgctggccggttgggcgcttaacgatgcggaaatagcggtgccttgttcgcaggtcaataggatatcctgctcgcctgtgcccgcggtttgactgttagcgaaactgcctaaattgacgctgcctaaatccacggtgatggcaggtgtttctacccgacatcccatcgctttcataatcaattgcgtattccccaaatacagatgggtcaggatatcgccgccggagtcttccgttgcgctatcgcgaaaagatacgcgcgccagtgggctttggaatgtcgcggtaccggaggtgatcggaccgcctaaggcgaccagttcaacattgtaggcgggagccatcgcatggtgtgttttattgccatcgccattatggtaggtattatcgattggcatgacattatcgtaagggccagcattcgtttgggttttaatcgcaacgcccacgccggaaatcccggtgctaaataccggcgtgttgttcccgtcattcgcattgattgtcgctgatgtatttgactgcgcgctaccgggttcatataaaaaaccgaccttataatcgcgactacagccatccattgtgacttcggaggtggaaacccagcccgattgccacaacacctcgcctgcggtataggcgtggctatccaccacaagctgcgacggcggggtgatagtgatcgcgccttcattaccggaacgtttacaggaggcgtaactatgaccggaatacgcgaacagcagaataagcgccagatataaccttctcatgaaaaattcctgcttttataccaggtgaaatagaaagatgttattgccatgcaatagtgatcgtcacaacggacgtgaaatcccctgccgtgacttttccgtgcggggtatacatccttgcggcgacaggcaaattggcttcatgggtattactgttgatatccaccgtgtaagtgacgttgttggccagattgaccagacttttaccgtccaggttaaaaagctgtaatcctaaatcctgcgccggattggccgcgctgtttgcataaatcgcagaagcataatttggatcgggataaggtacgccgttaaatgaaatcgcggcttttgtggtcgttgccgggcaattcgtcatttttatggtgaaaggaatggtggcggtattgccaccggccacggcgatatccgcccgggcatattgtccaagagagagcgtgtcggggaccgtcacggtacacggatcggcataaattaatcccgtaacgttaatgcctacggcatctgcggtattgtatgccgcgctgatcgagggcgaccataatgccagacccgtgaacgttaacagggcggctaatgcagcaaatctgttcatattcatcttttatcccaccagaatcactggcattgctcgtgtaagatttctacgccagaagcggagggggagctcggtatacgataagagacctgacactggtctgctgctgttggtccccacttcactaataaccgcccttgtttttccagtccggttaaccaggcctgccccgcatcaccaacaaaactgctgtgattgtctggttttgttaaagacgagacggtcgcgccaaaaggaacaggaagattgtttatgcgggttaataccatcaatgccttgtaaccaatattggttttatattcagccctgaccaccgcgccacgggtaggcaccagcgttttactggtatcaatgagctcaatattttttctaatgcccgtcgtatctaaagagacttcattacgatggtaaggcgaagcataaggtacgacggcataaccccgaaaatcggtgtccacgcccgtttcgttattcacggggacacccgctgcgccaggggctttaaccaatatgatggtgtcgtccattggctgggatagtgtcaggccatttcgatgtaacagtacgccgccctgaacgccataattcaggcgacgcatatgattatcgtagctatatccgccgttaatatccgcatacgtcccgttataggttgcgctcacattaccgctggtggctttctcttgagaggaataaccttcctgaacgctccatgagagatttttctgtgccagcgctgttccgtttaaaccgacagtatgcgtggtatcgccgtctttcgcggagttcatattgtaggtggcatacgttgacggcataaaggcatctaacggaatactaatattgattgaaatttgctggtcattactgtcttccgtatcgtcgtcttcatcctgagaattatcggcgttcagcgtataagaatagttaatgccatagcttacgttatgccatgtgttgttatagccaatacctaatgatgtggtatgagtgtcattccagtaatcttcattatataaagtgagtgaaatggaaccgtagataatgtcttgcgataacgacaggtcggtgcgattgcggacatgatcatagtgactattatcgctataggtatccagcacatcctcaagagcgtagtaatctttggtcgaataacggtagccggcgacagtgaaattggtgcctgttgactgaatatctttgctgtaacgaatacgccaggattgtccggtaagcgtatcgctaaccacatcgcctgctttaatttttgaccatgagttggtgacgtctaaagacaatgcgcccagatcgccaaggtttaagcctgtcccgatgagcgccgcatgataaacatcattgctcagcgtactctctattccgccataggcggttatgccgcctgctaatccgtataaggccgtcagttcagcgaagttctgttgcgcggaatgcgtatctgatgaacgcgtgcggcctaccgtcaggtcgtatttcaggtggccttcacgctgtaataccggaacgctggcgtagggcacaatgaaatgctgttcagaaccatcggattctttgatggtgacgtacaggtcgcccgaaccgccggttggataaagatcgttgatggcgaatggacccgccggaacgttagttttgtagatggtataaccgttttgttcaacggttacctgcgcgctgcttttggccaccccgcgaatgaccggggcgaaccctttcatactgtccggcaacatatcgtcatcagaagagatctgtacgcccttaaatgaaatactgtcaaagacgtccgcgggcgtgttattttccccggcgatcagctgtccttttaaaaattcgatatcgcgagaaacataggtgtaggcagaatcccagctattttgcccatcgctatcatgattccaggttgagtagttacgaaaacgccatgcgccaatgttaataccagggcgcaggttagcgtattcgctattttccgtccggttttcatcaatatcgtgatcctgcgatccggtaaaactgtagttcagcaaaaaagcattaatgccttcatcccattcgctggtagggacgaattctcgcgggtcggcgatcaacgcgatttgagggatcgctaaatccagccggttaccgatgacattaaactttgctacagcgccagccagcagactaagatcggtacacccgtttgggtcatttttaagctcggggaagttttctgtttttacgccccactgcttgagttgttcaacgctaagacacggctgtagggagagcttattatctgctgattttttatttttaaaggcaatattttttgtttcaacactggtgttattaatataaatatcaacattataggtgccttctgcctgcccccccttttcgaaaaccgatagatcgacattctccacgcccggttcatcattttccaacgataatggattaaaatgatcatgcgctaacgctggttttatggaacagcatataaagagaaacgataacgctaattgagaacggggctctactctggagaattgcacagtaaaagtcctgaaagggtaaaagtaaaatgaagtcgttaatggctagaatgaaccggaatgcggctctaaactcatcccataatcgctgattaatcgccacgttaccgtgccatgaggggcggcagtagaacccaatttaaatgacgctgatgattttggcggaacgaaggtcgctgatttcacttcatggctgttaagcgtcacactggcaaagttcatataatagggagtggggttatttacggtaataacatcacctgccgtctgccattttaattgttggctctggctatcaggcgttgattttgttaatgctggcggtcgatatataagctttatttgggtattaatggagatttccacgcggttcgcggaggcattatcatcaatagaaggaatacccttaatattgagccagtacatagactcccgatctgcaggtaggggggcgccagagcgaataacccgaatactgttcttttgcccggcatcaaggcgaaaaagaggcggggtgataataaacgcctgcttatttgtgacctggggatcggcaaccgataaccatgactgaacaagattcgctttgctgtctttattctctacattgattgacgactcatcattattgccgtcgaaaaccagtcgggttccgccaacaacaatgctggcatgggcaacatggcttgtcagtaatacggccaacacggatttctttatgtgtttcattttttactctgtaaagatgttttacgctatggactggcatcctgcctgtccacatcaggatgagaatgccttactgatacgaaacggtatacgtaacctgagtgctaacatctccaccggttacggttgcggaaccatcgtttgccatggcggcgtaataggtaaagtctgctgtcgagccgtcggttggcaggtttactgcggcatcatccgtgttatctgtcacatcgctatgtgaagcgttctgaatagaaataccgacacccgcggcgcccgtttccgatccttcgtccgcgtttttgaagtacgttgggttagaatcatctgttgcgccgtggaagcggaacatggcttgggttggtacgccagtccctgcttccgggcagctaaccaggcttacggtaaacggcacgtaatcggttgtggcgcctttttccgcgatgcgttctttgctgtaattacccaaatcaatggtggtatccgtggagccattcacctgaaccgtacacgcctgatcgtaaattttgccattgaacgtaatcgtgttctgggcaaataccggtgtggatgctacggcagttaacattgccaggatgattattttcttattaaacatattaattgttgcctgattctattcgctgaaaaataaagatagccatataaaataaaatattatattttactctgtatgcgcttctttctgttctgtagataagcaggcggctattctacgtatatcaactatgaactcaataaaaattctgatgcaatattgaacggcagtccagtttcggacccggtaacaaagtttaataaaataccactaaagaagtatggttgatgactggatttatagagcaagatctcttttttgataatagttattatttcctggaggatttatttaactctatattgctttatttttaataatatacgacgcttgtccgtttaaaatgaaaccggcaggtttcgaagctctaacagtcttccatgcagtatttttatatagtcccccgcttttagttctgaaagtacctgcatgatacggctgcgtgaaagcccggttctctgctgtatgaagttctgtgcattgatctcaaatcgtgagctttcaggatacgaccacagttcaagtaacagcgcttttatctggctataggcgtcctgcccgataagatttctgtcacggttagtcatgaaagcaatgcggtacatcaggatgttcgaaatgtcacgccagagatgcttttcatcagctatttccacaaaatcttttactgggacaggataatattcacaggtggtttcggcgataaaaaagacttctgaattctcttctaactggtataagtcagcataggcatctacaaggcctaaaatcattggtgagacaccgcagcccattacaatgctgtcgatacgccgacatactttaatagcgcctttagtgattaacaggatgtgggattgattatcaatcttgatatccagtgttttaccggctgtaatagtgacaggggagatgttttgaataacgtgccgatgaatatttaaaatggcttgcaggtttttttctttccctgtgggacgatacacattcccgccgtttaactgcttcatatcttccccattattatggctgataaagtggttgactattaaaaggtaaacataaatttaatattcacttaaaattataattaagtaaattaaaatagccaacaagaatatttaagtcaatgtattcaccttatcaatgcatgagcgacaacgctgtttgtaaggttaaccatagtaaatgtgatgattttatttgcaatcattttatgacagctatcataggtaccgtgcttaacgagcgcgtagagcgtacaggatagcgaagcgatgaacatcgctattggaggatacgaatgagagaaaagtacaaaatgcaggcgggcggcgttttactgagcgaaatcgccgcctgccggaactcctcccggcgggagccataagcggttagcggtactggacgatcaggctttgaatctccggatgatcttttaacgacacgtgccgtaccgtggcgattccattcatcaacgaaatagcgtttccagacggtgtggcgactgtctgcaaatgggggatattattccgcaaacatgatacctcgatattgcgatcgtgaggcgcaagattacaaccatattcgacaatctggcctttgaaatgaataacgcctgcggagaccggcgcggtagcagccagcgcggctgatgaagctgacatcgctgcacaaaacaggtagcagcataatggtgattttttcatcctttgaaacctcacgtcctgtgagcatccccttattttttggggactaacaaatcccgtgtattactctttaatgtaaatacacaaactaccttaactttcgcaagctgagataaacagcgctatacgacaatttttatgtaaaagagtacgtcataacggcaggtcaggagggaaagcgaggccgcttagcggaagggggacataagaaacagccagtaagaataacttaccggctgtttttacagtttggcgcctgggccgaattaatcctgcaggtcgccgcagaagcgataaccttcgccgtgaatggtggcgatgatttccggcgtatccggcgtggattcgaaatgcttacgaatacgacgaatggtaacgtcaacagtacggtcatgcggcttcagctcgcggccggtcattttcttcaacagctctgcgcgcgactgaattttgccagggttttcgcagaagtgcagcatcgcgcggaactcgctgcgcggtagtttatactgctcgccgtccgggccgatcagtgaacgactgttgatatctagttcccaaccgttgaacttgtagctttcaacgctacgacgctcttcgctgacggtacccaggttcatggtacgggacagcaggttgcgggcacggatggtcaattcgcgtgggttaaacggtttggtgatgtaatcatccgcgccgatttcgaggccgagaattttgtcgacttcgttatcgcggcccgtcaggaacatcagcgcaacgttagcctgttcacgcagttcacgcgctaacaggagaccgtttttccctggcagattgatatccatgatcaccaggttgatgtcatattcagagaggatctgatgcatttccgcgccatctgtcgcttcgaatacatcatagccttccgcttcgaaaatacttttcaacgtgttgcgtgttaccaactcgtcttcaacgataagaatgtgcggggtctgcatgtttgctacctaaattgccaactaaatcgaaacaggaagtacaaaagtccctgacctgcctgatgcatgtcgcaaattaacatgatcggcgtaacatgactaaagtacgtaattgcgttcttgatgcactttccatcaacgtcaacaacatcattagcttggtcgtgggtactttccctctggacccgacagtgtcaaaaacggctgtcatcctaaccattttaacagcaacataacaggctaagacgtaccggacacctaataaaactacgcttcgttgacatatatcaagttcaattgtagcacgttaacagtttgatgaaatcatcgtagctaaatgctagctttcatcacaaatttgcaatattccaactagttacgtaagccaactaataaatgtgatgaatccaaagaacaggatctattttaaattaaattatcctaaataaacagtaggataacgatgttctgttaacataaacagcaatagtacagatacgcaatagtgtagcgtcttttacgaaatcaaaaatgctttttcagtgatatcagttaaaattttgtaaatttgcgaagcgtaatatgcttacaaacgccagctaatttcctgtaaattagtcaaaaagagtaatgaaatgcgtgtaacaattgttcttgtcgctcccgccagagcggaaaatattggcgcagccgcccgggctatgaagaccatgggatttactgacctgcgtattgtcgacagccaggcgcacctggagcccgccacccgttgggtcgcacatggatctggagatattattgataatattgaggttttccacacccttgccgacgcactccacgatgtggattttaccgtagcgacgacagcccgcagccgggcaaaatttcattactacgcttcgcccgctgaactggttcccttattacaggaaaaatcacgctggatgcgtcatgccgcgctggtttttggccgtgaggattccggtctgaccaatgacgagctggcgctggcggatgtattgaccggcgtgccgatggcggcggattacccttcgctcaatctgggtcaggcggtcatggtgtattgctatcaattagcaggtttaatgcaacagaccacagaatccgttgatattgctgatgaatcgcagttacaggcgttacgcgcgcgccttttacgcctgctaacgactctggaggcggccgatgaccacaaattaaccgactggctacaacagcgaatcggcctgctgggacagcgagatacggtaatgttgcaccgtttggtccatgatattgaaaaaaaactaacaaaataacgtgctgtaatttttaaaataata
